(19) United States
(12) Patent Application Publication
(10) Pub. No.: US 2022/0387515 A1
(43) Pub. Date: Dec. 8, 2022

(54) DIFFERENTIAL KNOCKOUT OF AN ALLELE OF A HETEROZYGOUS ELANE GENE USING GUIDES 21-30 NUCLEOTIDES IN LENGTH

(71) Applicants: David Baram, Tel Aviv (IL); Lior Izhar, Tel Aviv (IL); Asael Herman, Ness-Ziona (IL); Rafi Emmanuel, Ramla (IL); Liat Rockah, Rishon LeZion (IL); Nadav Marbach Bar, Rehovot (IL); Michal Golan Mashiach, Ness-Ziona (IL); Joseph Georgeson, Rehovot (IL)

(72) Inventors: David Baram, Tel Aviv (IL); Lior Izhar, Tel Aviv (IL); Asael Herman, Ness-Ziona (IL); Rafi Emmanuel, Ramla (IL); Liat Rockah, Rishon LeZion (IL); Nadav Marbach Bar, Rehovot (IL); Michal Golan Mashiach, Ness-Ziona (IL); Joseph Georgeson, Rehovot (IL)

(73) Assignee: EmendoBio Inc., Wilmington, DE (US)

(21) Appl. No.: 17/775,017

(22) PCT Filed: Nov. 5, 2020
(86) PCT No.: PCT/US2020/059186

§ 371 Date: May 6, 2022

Related U.S. Application Data
(60) Provisional application No. 62/931,659, filed on Nov. 6, 2019.

(51) Int. Cl. A61K 35/32; C12N 15/11; C12N 9/22; C12N 15/90; C12N 5/0789; A61K 35/17; A61P 7/00

(52) U.S. Cl. CPC A61K 35/32; C12N 15/11; C12N 9/22; C12N 15/907; C12N 5/0647; A61K 35/17; A61P 7/00; C12N 2310/20; C12N 2800/80

(57) ABSTRACT

Methods for inactivating in a cell a mutant allele of the elastase, neutrophil expressed gene (ELANE gene) gene having a mutation associated with severe congenital neutropenia (SCN) or cyclic neutropenia (CyN) and which cell is heterozygous at one or more polymorphic sites selected from the group consisting of: rs10424470, rs4807932, rs10414837, rs376107533, rs3761010, rs351108, rs3826946, rs10413889, rs3761007, rs10409474, rs3761005, rs351107, rs3761001, rs740021, rs781452480, rs371057361, rs570466264, rs1041904080, rs7250194, rs17216649, rs199720952, rs6510983, rs17223066, rs7255385, rs9749274, rs111361200, rs112639467, rs141213775, rs28591229, rs10469327, rs3834645, rs1683564, rs71335276, and rs8107095, the method comprising
introducing to the cell a composition comprising:
   a CRISPR nuclease or a sequence encoding the CRISPR nuclease; and
   a first RNA molecule comprising a guide sequence portion having 21-30 nucleotides,
wherein a complex of the CRISPR nuclease and the first RNA molecule affects a double strand break in the mutant allele of the ELANE gene.

[0001] This application claims the benefit of U.S. Provisional Application No. 62/931,659 filed Nov. 6, 2019, the contents of which are hereby incorporated by reference.

[0002] Throughout this application, various publications are referenced, including referenced in parenthesis. The disclosures of all publications mentioned in this application in their entireties are hereby incorporated by reference into this application in order to provide additional description of the art to which this invention pertains and of the features in the art which can be employed with this invention.

### REFERENCE TO SEQUENCE LISTING

[0003] This application incorporates-by-reference nucleotide sequences which are present in the file named “201105_91193-A-PCT_Sequence_Listing_AWG.txt”, which is 779 kilobytes in size, and which was created on Nov. 5, 2020 in the IBM-PC machine format, having an operating system compatibility with MS-Windows, which is contained in the text file filed Nov. 5, 2020 as part of this application.

### BACKGROUND OF INVENTION

[0004] There are several classes of DNA variation in the human genome, including insertions and deletions, differences in the copy number of repeated sequences, and single nucleotide polymorphisms (SNPs). A SNP is a DNA sequence variation occurring when a single nucleotide (adenine (A), thymine (T), cytosine (C), or guanine (G)) in the genome differs between human subjects or paired chromosomes in an individual. Over the years, the different types of DNA variations have been the focus of the research community either as markers in studies to pinpoint traits or disease causation or as potential causes of genetic disorders. SNPs are usually considered benign and not causing disease.

[0005] A genetic disorder is caused by one or more abnormalities in the genome. Genetic disorders may be regarded as either “dominant” or “recessive.” Recessive genetic disorders are those which require two copies (i.e., two alleles) of the abnormal/defective gene to be present. In contrast, a dominant genetic disorder involves a gene or genes which exhibit(s) dominance over a normal (functional/healthy) gene or genes. As such, in dominant genetic disorders only a single copy (i.e., allele) of an abnormal gene is required to cause or contribute to the symptoms of a particular genetic disorder. Such mutations include, for example, gain-of-function mutations in which the altered gene product possesses a new molecular function or a new pattern of gene expression. Gain-of-function mutations are generally dominant negative mutations. An example of a dominant negative mutation is haploinsufficiency where one allele is mutated and loses its function and the single wild type allele left does not generate enough protein to be sufficient for a specific cellular function. Other examples include dominant negative mutations which have a gene product that acts antagonistically to the wild-type allele.

### Neutropenia

[0006] Neutropenia is defined as a reduction in the absolute number of neutrophils in the blood circulation and commonly diagnosed by measuring the absolute neutrophil count (ANC) in peripheral blood. The severity of neutropenia is characterized as mild with an ANC of 1000-1500/4, moderate with an ANC of 500-1000/4, or severe with an ANC of less than 500/4 (Boxer 2012).

[0007] Neutropenia can be classified as congenital (hereditary) or acquired. The two main types of the congenital condition, commonly of autosomal dominant inheritance, are cyclic neutropenia (CyN) and severe congenital neutropenia (SCN). Cyclic neutropenia is characterized by fluctuating neutrophil counts from normal levels to zero while severe congenital neutropenia (SCN) is characterized by very low ANC (500/4) observed at birth, maturation arrest of the myelopoiesis in bone marrow at the promyelocyte/myelocyte stage, and early onset of bacterial infections (Carlsson et al. 2012; Horwitz et al. 2013).

[0008] SCN may be diagnosed by measuring a very low ANC in the blood and examining bone marrow aspirate to identify myeloid maturation arrest (Dale 2017). SCN is usually diagnosed before age 6 months, while diagnosis for CyN is generally raised during the second year of life, or later, and the main clinical manifestation is recurrent acute stomatologic disorders. Bone marrow examination is often necessary to rule out malignant hemopathies, determine cellularity, assess myeloid maturation, and detect signs of a precise etiology, with cytogenetic bone marrow studies now crucial when SCN is suspected. Antineutrophil antibody assay, immunoglobulin assay (Ig GAM), lymphocyte immunophenotyping, pancreatic markers (serum trypsinogen and fecal elastase) and liposoluble vitamin levels (vitamins A, E and D) are also of interest in assessing SCN and CyN (See Donadieu 2011).

[0009] SCN can be autosomal-recessive (HAX1, G6PC3), autosomal-dominant (ELANE, GFI1), or X-linked (WAS) forms of inheritance or occur sporadically (Carlsson et al. 2012; Boxer 2012).

[0010] Cyclic and congenital neutropenia are most frequently caused by mutations in the “elastase, neutrophil expressed gene” (ELANE gene)—the gene for neutrophil elastase. “ELANE gene mutations are identified in 40-55% of SCN patients and males and females are equally affected (Donadieu et al. 2011; Dale 2017). Mutations in the ELANE gene are associated with autosomal-dominant and sporadic cases of SCN (Carlsson et al. 2012). To date, more than 200 different ELANE mutations have been identified, which are randomly distributed over all exons as well as in intron 3 and intron 4 (Skokowa et al. 2017). More than 120 distinct ELANE gene mutations related to CyN and SCN are now known, for example C151Y and G214R particularly associated with a poor prognosis. (See Makaryan et al. 2012; see also Germeshausen et al. 2013 for a comprehensive list of ELANE mutations related to CyN and SCN).

[0011] ELANE encodes neutrophil elastase (NE) which is involved in the function of neutrophil extracellular traps (networks of fibers that bind pathogens). Some studies suggest that the product of mutant ELANE acts to disrupt neutrophil production in the bone marrow and cause neutropenia. These studies indicate that mutations in NE initiate the unfolded protein response (UPR) leading to cell loss in the process of neutrophil formation in the marrow (Makaryan et al. 2017).

### Current Treatments

[0012] Granulocyte colony-stimulating factor (G-CSF) is considered the first-line treatment for SCN (Connelly, Choi, and Levine 2012). G-CSF stimulates the production of more neutrophils and delays their apoptosis (Schäffer and Klein 2007). Overall survival is now estimated to exceed 80%, including patients developing malignancies, although 10% of SCN patients still die from severe bacterial infections or sepsis (Skokowa et al. 2017). Although G-CSF therapy is successful in preventing mortality from sepsis, long-term treatment was identified to be associated with an increased risk of developing myelodysplastic syndrome (MDS) or leukemia in SCN patients. The most common leukemia in SCN is AML, but acute lymphoid leukemia (ALL), juvenile myelomonocytic leukemia (JMML), chronic myelomonocytic leukemia (CMML), and bi-phenotypic leukemia are also reported in the literature (Connelly, Choi, and Levine 2012). It was previously demonstrated that patients who had a robust response to G-CSF (doses≤8 μg/kg/day) had a cumulative incidence of 15% for developing MDS/leukemia after 15 years on G-CSF, while an incidence of 34% was reported in patients with poor response to G-CSF despite high doses (Rosenberg et al. 2010).

[0013] Hematopoietic stem cell transplant (HSCT) is an alternative, curative therapy for patients who do not respond to G-CSF therapy or who develop AML/MDS. However, patients with chronic neutropenia who undergo HCT are at increased risk of developing infectious complications such as fungal and graft-versus-host disease (Skokowa et al. 2017). Moreover, HCT requires a matched related donor for successful survival but most patients will not have an available matched donor (Connelly, Choi, and Levine 2012).

### SUMMARY OF THE INVENTION

[0014] Disclosed is an approach for knocking out the expression of a dominant-mutant allele by disrupting the dominant-mutant allele or degrading the resulting mRNA.

[0015] The present disclosure provides a method for utilizing at least one naturally occurring heterozygous nucleotide difference or polymorphism (e.g., single nucleotide polymorphism (SNP)) for distinguishing/discriminating between two alleles of a gene, one allele bearing a mutation such that it encodes a mutated protein causing a disease phenotype (“mutant allele”), and the other allele encoding for a functional protein (“functional allele”).

[0016] Embodiments of the present invention provide methods for utilizing at least one heterozygous SNP in a gene expressing a dominant mutant allele in a given cell or subject. In embodiments of the present invention, the SNP utilized may or may not be associated with a disease phenotype. In embodiments of the present invention, an RNA molecule comprising a guide sequence targets the mutant allele of the gene by targeting the nucleotide base present at a heterozygous SNP in the mutant allele of the gene and therefore having a different nucleotide base from the functional allele of the gene.

[0017] In some embodiments, the method further comprises the step of knocking out expression of the mutated protein and allowing expression of the functional protein.

[0018] The present invention provides a method for inactivating in a cell a mutant allele of the elastase, neutrophil expressed gene (ELANE gene) gene having a mutation associated with severe congenital neutropenia (SCN) or cyclic neutropenia (CyN) and which cell is heterozygous at one or more polymorphic sites selected from the group consisting of: rs10424470, rs4807932, rs10414837, rs376107533, rs3761010, rs351108, rs3826946, rs10413889, rs3761007, rs10409474, rs3761005, rs351107, rs3761001, rs740021, rs781452480, rs371057361, rs570466264, rs1041904080, rs7250194, rs17216649, rs199720952, rs6510983, rs17223066, rs7255385, rs9749274, rs111361200, rs112639467, rs141213775, rs28591229, rs10469327, rs3834645, rs1683564, rs71335276, and rs8107095 the method comprising
[0019] introducing to the cell a composition comprising:
   [0020] a CRISPR nuclease or a sequence encoding the CRISPR nuclease; and
   [0021] a first RNA molecule comprising a guide sequence portion having 21-30 nucleotides,
[0022] wherein a complex of the CRISPR nuclease and the first RNA molecule affects a double strand break in the mutant allele of the ELANE gene.

[0023] The present invention provides for a modified cell obtained by the methods of the present invention.

[0024] The present invention provides for a modified cell lacking at least a portion of one allele of the ELANE gene.

[0025] The present invention provides for a composition comprising modified cells and a pharmaceutically acceptable carrier.

[0026] The present invention provides for an in vitro or ex vivo method of preparing a composition, comprising mixing the cells of the present invention with the pharmaceutically acceptable carrier.

[0027] The present invention provides for a method of preparing in vitro or ex vivo a composition comprising modified cells, the method comprising:
[0028] a) isolating HSPCs from cells obtained from a subject with an ELANE gene mutation related to SCN or CyN and/or suffering from SCN or CyN and which subject is heterozygous at one or more polymorphic sites selected from the group consisting of: rs10424470, rs4807932, rs10414837, rs376107533, rs3761010, rs351108, rs3826946, rs10413889, rs3761007, rs10409474, rs3761005, rs351107, rs3761001, rs740021, rs781452480, rs371057361, rs570466264, rs1041904080, rs7250194, rs17216649, rs199720952, rs6510983, rs17223066, rs7255385, rs9749274, rs111361200, rs112639467, rs141213775, rs28591229, rs10469327, rs3834645, rs1683564, rs71335276, and rs8107095, and obtaining the cell from the subject;
[0029] b) introducing to the cells of step (a) a composition comprising:
   [0030] a CRISPR nuclease or a sequence encoding the CRISPR nuclease; and
   [0031] a first RNA molecule comprising a guide sequence portion having 21-30 nucleotides,
[0032] wherein a complex of the CRISPR nuclease and the first RNA molecule affects a double strand break in the mutant allele of the ELANE gene in one or more cells,
   [0033] optionally, introducing to the cells a second RNA molecule comprising a guide sequence portion capable of complexing with a CRISPR nuclease, wherein the complex of the second RNA molecule and CRISPR nuclease affects a second double strand break in the ELANE gene in the one or more cells
[0034] so as to inactive the mutant allele of the ELANE gene in one or more cells thereby obtaining modified cells; optionally
[0035] c) culture expanding the modified cells of step (b),
[0036] wherein the modified cells are capable of engraftment and giving rise to progeny cells after engraftment.

[0037] The present invention provides for use of a composition prepared in vitro by a method comprising:
[0038] a) isolating HSPCs from cells obtained from a subject with an ELANE gene mutation related to SCN or CyN and/or suffering from SCN or CyN and which subject is heterozygous at one or more polymorphic sites selected from the group consisting of: rs10424470, rs4807932, rs10414837, rs376107533, rs3761010, rs351108, rs3826946, rs10413889, rs3761007, rs10409474, rs3761005, rs351107, rs3761001, rs740021, rs781452480, rs371057361, rs570466264, rs1041904080, rs7250194, rs17216649, rs199720952, rs6510983, rs17223066, rs7255385, rs9749274, rs111361200, rs112639467, rs141213775, rs28591229, rs10469327, rs3834645, rs1683564, rs71335276, and rs8107095;
[0039] b) introducing to the cells of step (a) a composition comprising:
   [0040] a CRISPR nuclease or a sequence encoding the CRISPR nuclease; and
   [0041] a first RNA molecule comprising a guide sequence portion having 21-30 nucleotides,
[0042] wherein a complex of the CRISPR nuclease and the first RNA molecule affects a double strand break in the mutant allele of the ELANE gene in one or more cells,
   [0043] optionally, introducing to the cells a second RNA molecule comprising a guide sequence portion capable of complexing with a CRISPR nuclease, wherein the complex of the second RNA molecule and CRISPR nuclease affects a second double strand break in the ELANE gene in the one or more cells
[0044] so as to inactive the mutant allele of the ELANE gene in one or more cells thereby obtaining modified cells; optionally;
[0045] c) culture expanding the cells of step (b) wherein the modified cells are capable of engraftment and giving rise to progeny cells after engraftment; and
[0046] d) administering to the subject the cells of step (b) or step (c) for treating the SCN or CyN in the subject.

[0047] The present invention provides for a method of treating a subject afflicted with SCN or CyN, comprising administration of a therapeutically effective amount of the modified cells, compositions, or the compositions prepared by the methods of the instant invention

[0048] The present invention provides for a method for treating SCN or CyN in a subject with an ELANE gene mutation relating to SCN or CYN in need thereof and which subject is heterozygous at one or more polymorphic sites selected from the group consisting of: rs10424470, rs4807932, rs10414837, rs376107533, rs3761010, rs351108, rs3826946, rs10413889, rs3761007, rs10409474, rs3761005, rs351107, rs3761001, rs740021, rs781452480, rs371057361, rs570466264, rs1041904080, rs7250194, rs17216649, rs199720952, rs6510983, rs17223066, rs7255385, rs9749274, rs111361200, rs112639467, rs141213775, rs28591229, rs10469327, rs3834645, rs1683564, rs71335276, and rs8107095, the method comprising:
[0049] a) isolating HSPCs from cells obtained from the subject;
[0050] b) introducing to the cells of step (a) a composition comprising:
   [0051] a CRISPR nuclease or a sequence encoding the CRISPR nuclease; and
   [0052] a first RNA molecule comprising a guide sequence portion having 21-30 nucleotides,
[0053] wherein a complex of the CRISPR nuclease and the first RNA molecule affects a double strand break in the mutant allele of the ELANE gene in one or more cells,
   [0054] optionally, introducing to the cells a second RNA molecule comprising a guide sequence portion capable of complexing with a CRISPR nuclease, wherein the complex of the second RNA molecule and CRISPR nuclease affects a second double strand break in the ELANE gene in the one or more cells
[0055] so as to inactive the mutant allele of the ELANE gene in one or more cells thereby obtaining modified cells; optionally;
[0056] c) culture expanding the cells of step (b) wherein the modified cells are capable of engraftment and giving rise to progeny cells after engraftment; and
[0057] d) administering to the subject the cells of step (b) or step (c)
[0058] thereby treating the SCN or CyN in the subject.

[0059] The present invention provides for a method for treating SCN or CyN in a subject with an ELANE gene mutation relating to SCN or CYN in need thereof and which subject is heterozygous at one or more polymorphic sites selected from the group consisting of: rs10424470, rs4807932, rs10414837, rs376107533, rs3761010, rs351108, rs3826946, rs10413889, rs3761007, rs10409474, rs3761005, rs351107, rs3761001, rs740021, rs781452480, rs371057361, rs570466264, rs1041904080, rs7250194, rs17216649, rs199720952, rs6510983, rs17223066, rs7255385, rs9749274, rs111361200, rs112639467, rs141213775, rs28591229, rs10469327, rs3834645, rs1683564, rs71335276, and rs8107095, the method comprising
[0060] administering to the subject autologous modified cells or progeny of autologous modified cells, wherein the autologous modified cells are modified so as to have a double strand break in the mutant allele of the ELANE gene,
   [0061] wherein said double strand break results from introduction to the cells of a composition comprising a CRISPR nuclease or a sequence encoding the CRISPR nuclease and a first RNA molecule wherein a complex of the CRISPR nuclease and the first RNA molecule affects a double strand break in the mutant allele of the ELANE gene so as to inactive the mutant allele of the ELANE gene in the cell,
[0062] thereby treating the SCN or CyN in the subject.

[0063] The present invention provides for a method of selecting a subject for treatment from a pool of subjects diagnosed with SCN or CyN, comprising the steps of:
[0064] a) obtaining cells from each subject in the pool of subjects;
[0065] b) screening each subject's cells for an ELANE gene mutation related to SCN or CyN, and selecting only subjects with an ELANE gene mutation related to SCN or CyN;
[0066] c) screening by sequencing the cells of the subjects selected in step (b) for heterozygosity at one or more polymorphic sites selected from the group consisting of: rs10414837, rs3761005, rs1683564,
[0067] d) selecting for treatment only subjects with cells heterozygous at the one of more polymorphic sites
[0068] e) obtaining hematopoetic stem and progenitor cells (HSPC) cells from the bone marrow of the subject either by aspiration or by mobilization and apheresis of peripheral blood; and
[0069] f) introducing to the HSPC cells of step (e):
   [0070] one or more CRISPR nucleases or sequences encoding the one or more CRISPR nuclease;
   [0071] a first RNA molecule comprising a guide sequence portion having 21-30 contiguous nucleotides containing nucleotides in the sequence set forth in any one of SEQ ID NOs: 1-3751, targeting the nucleotide base of the heterozygous allele of the one or more polymorphic sites present on the mutant allele of the ELANE gene, and
   [0072] a second RNA molecule comprising a guide sequence portion targeting a sequence in intron 4 of the ELANE gene, optionally wherein the guide sequence portion of the second RNA molecule has 21-30 nucleotides, optionally wherein 21-30 contiguous nucleotides contain nucleotides in the sequence set forth in any one of SEQ ID NOs: 2954-3751.
[0073] wherein a complex of the first RNA molecule and a CRISPR nuclease affects a first double strand break in the mutant allele of the ELANE gene in one or more of the HSPC cells and a complex of the second RNA molecule and a CRISPR nuclease affect a second double strand break in intron 4 of both alleles of the ELANE gene in the one or more HSPC cells in which the complex of the first RNA molecule and the CRISPR nuclease affected a first double strand break, thereby obtaining modified cells;
[0074] g) administering to the subject the modified cells of step (0,
[0075] thereby treating SCN or CyN in the subject.

[0076] The present invention provides an RNA molecule comprising a guide sequence portion having 21-30 contiguous nucleotides containing nucleotides in the sequence set forth in any one of SEQ ID NOs: 1-3751.

[0077] The present invention provides a method for inactivating in a cell a mutant ELANE allele, the method comprising delivering to the cell the RNA molecules or compositions of the present invention.

[0078] The present invention provides use of the RNA molecules, the compositions, or the composition prepared by the method of the present invention for inactivating in a cell a mutant ELANE allele.

[0079] The present invention provides a medicament comprising the RNA molecules, compositions, or the compositions prepared by the methods of the instant invention for use in inactivating in a cell a mutant ELANE allele, wherein the medicament is administered by delivering to the cell the RNA molecules, compositions, or the compositions prepared by the methods of the instant invention.

[0080] The present invention provides for use of the methods, the modified cells, the compositions, or the compositions prepared by the methods, or the RNA molecules of the instant invention for treating ameliorating or preventing SCN or CyN in to a subject having or at risk of having SCN or CyN.

[0081] The present invention provides for a medicament comprising the RNA molecules, compositions, compositions prepared by the methods of the instant invention, or the modified cells of the instant invention, for use in treating ameliorating or preventing SCN or CyN, wherein the medicament is administered by delivering to a subject having or at risk of having SCN or CyN the RNA molecules, compositions, compositions prepared by the methods of the instant invention, or the modified cells of the instant invention.

[0082] The present invention provides for a kit for inactivating a mutant ELANE allele in a cell, comprising the RNA molecules of the instant invention, a CRISPR nuclease or a sequence encoding the CRISPR nuclease, and/or a tracrRNA molecule or a sequence encoding the tracrRNA; and instructions for delivering the RNA molecule; CRISPR nuclease or sequence encoding the CRISPR nuclease, and/or tracrRNA molecule or sequence encoding the tracrRNA to the cell to inactivate the mutant ELANE allele in the cell.

[0083] The present invention provides for a kit for treating SCN or CyN in a subject, comprising the RNA molecules of the instant invention, a CRISPR nuclease or sequence encoding the CRISPR nuclease, and/or a tracrRNA molecule or sequence encoding the tracrRNA molecule; and instructions for delivering the RNA molecule; CRISPR nuclease, and/or the tracrRNA to a subject having or at risk of having SCN or CyN so as to treat the SCN or CyN.

[0084] The present invention provides a kit for inactivating a mutant ELANE allele in a cell, comprising the compositions, the composition prepared by the methods of the instant invention, or the modified cells of the instant invention, and instructions for delivering the composition to the cell so as to inactivate the ELANE gene in the cell.

[0085] The present invention provides a kit for treating SCN or CyN in a subject, comprising the composition, the compositions prepared by the methods of the instant invention, or the modified cells of the instant invention, and instructions for delivering the compositions, the compositions prepared by the methods of the instant invention, or the modified cells of the instant invention, to a subject having or at risk of having SCN or CyN so as to treat SCN or CyN.

### BRIEF DESCRIPTION OF THE DRAWINGS

[0086] FIG. 1: Schematic showing excising the promoter region from an upstream SNP position until intron 3 or intron 4 or the 3′ UTR. In one example, a first guide sequence targets a specific sequence of a heterozygous SNP position in an upstream region of the mutant allele (strategy 1a—rs10414837, strategy 1b—rs3761005) and a second guide sequence targets a sequence in intron 4 which is common to two alleles of the gene.

[0087] FIG. 2: Schematic showing excising the promoter region from an upstream SNP position until intron 3 or intron 4 or the 3′ UTR. In one example, a first guide sequence targets a specific sequence of a heterozygous SNP position in an upstream region of the mutant allele (strategy 1a—rs10414837, strategy 1b—rs3761005) and a second guide sequence targets a sequence in intron 3 which is common to two alleles of the gene. In another, a first guide sequence targets a specific sequence of a heterozygous SNP position in an upstream region of the mutant allele (strategy 1a—rs10414837, strategy 1b—rs3761005) and a second guide sequence targets a sequence in 3′ UTR which is common to two alleles of the gene.

[0088] FIG. 3: Schematic showing excising from intron 3 or intron 4 or 3′ UTR to regions downstream to the 3′ UTR. In one example, a first guide sequence targets a specific sequence of a heterozygous SNP position in an upstream region of the mutant allele (strategy 2—rs1683564) and a second guide sequence targets a sequence in intron 4 which is common to two alleles of the gene. In another, a first guide sequence targets a specific sequence of a heterozygous SNP position in an upstream region of the mutant allele (strategy 2—rs1683564) and a second guide sequence targets a sequence in intron 3 which is common to two alleles of the gene. In a further, a first guide sequence targets a specific sequence of a heterozygous SNP position in an upstream region of the mutant allele (strategy 2—rs1683564) and a second guide sequence targets a sequence in 3′ UTR which is common to two alleles of the gene.

[0089] FIG. 4: Schematic showing excising from intron 3 or intron 4 or 3′ UTR to regions downstream to the 3′ UTR. The strategy is designed such as to specifically knock-out the disease-causing allele (‘mutant allele’), while leaving the healthy allele intact. Allele specific editing is achieved by using guides that target discriminating (heterozygous) SNP positions with relatively high heterozygosity frequency in the population.

[0090] FIG. 5: The expected coverage in the population based on heterozygotes frequency and overlap/linkage between select heterozygous SNPs. Designing alternative solutions for the three therapeutic strategies may enable a coverage of about 80% of the population. It is evaluated that 80% of the population bear one or more heterozygous SNPs from the list above. From which 33% bear one heterozygous SNP, 31% bear two heterozygous SNPs from the list, 16% bear three heterozygous SNPs and 20% do not bear any of the SNPs listed above.

[0091] FIG. 6: HeLa cells seeded into 96 well-plate (3K/well) and 24 h later were co-transfected using Turbofect reagent (Thermo Scientific) with either 65 ng of WT-Cas9 or Dead-Cas9, and 20 ng of a gRNA plasmid (identified as g36 through g66, which target different regions and SNPs in ELANE. Percent of editing was calculated according the following formula: 100%−(Intensity not edited band/Intensity total bands)*100. The mean activity of each gRNA following subtraction of the Dead-Cas9 background activity±SD of three independent experiments is shown.

[0092] FIG. 7: HSCs from healthy donors were nucleofected with RNA components of SpCas9-WT and gRNAs targeting either EMX1 (sgEMX1) or ELANE (g35: INT 4; g58: rs3761005; g62: rs1683564). 72 h post nucleofection gDNA was extracted and editing levels were assayed by IDAA. The mean % of editing±SD of two independent experiments performed in duplicates is shown.

[0093] FIG. 8: Specific knock-out of the mutated allele of the ELANE gene is mediated by excising intron 4 and exon 5 of the mutant allele of the ELANE gene. This is achieved by mediating a DSB in intron 4 and utilizing SNP rs1683564 for mediating an allele specific DSB.

[0094] FIG. 9: Intrinsic fidelity in human cells. OMNI-50 or SpCas9 nuclease were expressed in mammalian cell system by DNA transfection together with a sgRNA expressing plasmid. Cell lysates were used for site specific genomic DNA amplification and NGS. The percentage of Indels was measured and analyzed as described below for on-target vs off-target editing in HeLa cell line using ELANEg35_OMNI-50 or ELANEg62_OMNI-50 (see Table 7). In both cases the genomic On and Off target sequences are noted below the chart with PAM sequences underlined. Each experiment represents three independent repeats.

[0095] FIGS. 10A-10D: OMNI-50 activity Assay as RNP. OMNI-50 nuclease was over-expressed and purified. The purified protein was complexed with synthetic sgRNA to form RNPs. For the in-vitro assays (FIGS. 13A and 13B) RNPs were incubated with a linear DNA templates with the corresponding target and PAM sequences. Activity was verified by the ability to cleave the linear template. For the in-vivo assays (FIGS. 13C and 13D) U2OS cells were electroporated with RNP, and activity was determined as indel frequency by NGS. FIG. 10A: Activity assay of OMNI-50 RNP with different spacer lengths (17-23 nucleotides) of guide 35 (Table 4). FIG. 10B: Reducing amounts of RNPs (4, 2, 1.2, 0.6 and 0.2 μmol) with spacer lengths 20-23 nucleotides were incubated with 100 ng DNA target template. FIG. 10C: Activity assay for OMNI-50 as RNP in U2OS cells: RNPs with spacer lengths 17-23 nucleotides were electroporated into a U2OS cell line and editing levels (indels) measured by NGS. FIG. 10D: Activity assay for OMNI-50 as RNP in U2OS cells: RNPs with ELANE g35 sgRNA V1-4 were electroporated into a U2OS cell line and editing levels (indels) measured by NGS.

[0096] FIG. 11: Activity assay for OMNI-50 as RNP in iPSC: RNPs with spacer lengths 17-23 nucleotides (table 4) were electroporated into iPSC cell line and editing levels (indels) was measured by NGS.

[0097] FIG. 12: Scheme depicting excision strategy of ELANE cleaved in two locations, one in intron 4 in a non-discriminatory site (bi-allelic cut) and one in a heterozygous SNP site, rs1683564, located downstream to the 3′ UTR, which is an allele specific cut, resulting in allele specific deletion.

[0098] FIG. 13A-13D: Patient derived hematopoietic stem cells (HSC) harboring ELANE mutation G221termination (G221ter) depict excision-based rescue effect. FIG. 13A: Scheme depicting experimental workflow. Manipulated HSC electroporated with RNPs using Lonza P3 Cell Line 4D-Nucleofector™ X Kit with DZ100 program recover for 3 days in HSC rich media and subjected to differentiation by culturing for 7 days with IL-3, SCF, GMCSF & GCSF for proliferation and myeloid progenitor differentiation followed by a 7-day culture in GCSF for neutrophil differentiation. On day 14, cells were analyzed by FACS for monocytic subset represented by CD14 and neutrophilic subset represented by CD66b+CD14+ surface markers. FIG. 13B: Flow cytometry analysis of untreated and edited cells harvested from HSC-based neutrophilic differentiation from healthy and G221ter patients derived on day 14 of differentiation. Plots reveal a decrease in CD66b+CD14+ neutrophilic subset and enhanced CD14+ monocytic population in untreated patient derived differentiation in comparison to healthy volunteer. Note, excised patient HSC completely rescues neutrophil differentiation. FIG. 13C: Graph representing percent cellular composition of neutrophils & monocytes between healthy and G221ter patient donor at day 14. FIG. 13D: Graph representing excision efficiency at day 5 and 14 with sgRNA constant+sgRNA-564DS-ref measured by ddPCR from differentiated HSCs of healthy and G221ter patient cells homozygous to rs1683564, therefore, the excision is expected to be biallelic. Excision is determined by amplification of two regions in ELANE, Exon1 and Exon 5, using two different probes labeled with FAM and HEX, respectively. The ratio between the HEX and the FAM signals is translated to excision efficiency.

[0099] FIGS. 14A-14F: Patient derived hematopoietic stem cells (HSC) harboring S126L ELANE mutation depicts a rescue effect following differential editing of the mutated allele. FIG. 14A: Flow cytometry analysis of untreated and edited cells harvested from HSC-based neutrophilic differentiation from healthy and S126L patients derived on day 14 of differentiation. Plots reveal a decrease in CD66b+CD14+ neutrophilic subset and enhanced CD14+ monocytic population in untreated patient derived differentiation in comparison to healthy volunteer. Note, sgRNA constant+sgRNA-564DS-ref excised patient HSC linked to mutation completely rescues neutrophil differentiation in contrast to sgRNA constant+sgRNA-564DS-alt which depicts a partial rescue effect. FIG. 14B: Graph representing percent cellular composition of neutrophils & monocytes between healthy and S126L patient at day 14. FIG. 14C: Graph representing excision efficiency at day 4 and 14 with sgRNA constant+sgRNA-564DS-ref and sgRNA constant+sgRNA-564DS-alt measured by ddPCR from differentiated HSCs of healthy and S126L patient cells heterozygote for the rs1683564, therefore, the excision is expected to be allele specific. Excision is determined by amplification of two regions in ELANE, Exon1 and Exon 5, using two different probes labeled with FAM and HEX, respectively. The ratio between the HEX and the FAM signals is translated to excision efficiency. Note, excision efficiency with sgRNA-564DS-ref composition results in higher efficiency than sgRNA-564DS-alt. FIG. 14D: Graph representing allele specific editing at day 4 and 14 with sgRNA constant+sgRNA-564DS-ref and sgRNA constant+sgRNA-564DS-alt measured by ddPCR from differentiated HSCs of healthy and S126L patient cells heterozygote to rs1683564. Editing specificity is determined by two competitive probes, FAM probe which binds the Alternative Allele and HEX probe which binds the Reference Allele, governing decrease signal from the edited allele. Note, reduction in both reference and alternative allele when editing with sgRNA-564DS-ref indicating reduced specificity in comparison to sgRNA-564DS-alt. The ratio between the concentration of the Reference allele to the alternative allele in Heterozygote untreated cells is 1. The graph represents average concentration of reference allele (HEX), alternative allele (FAM), normalized to endogenous gene control RPP30 and STAT1 Exon 3 for each gDNA sample.

[0100] FIG. 14E: The level of ELANE's mRNA of all treatments was assessed by qRT-PCR following differentiating the cells towards neutrophils. The level of the mRNA is quantified relative to untreated cells that were not edited. FIG. 14F: IGV snapshot of allele specific transcription determined by NGS on cDNA targeting exon-4 harboring S126L mutation extracted from sgRNA constant+sgRNA-564DS-ref and sgRNA constant+sgRNA-564DS-alt excised patient HSC compared to untreated cells. Note, mutated allele specific RNA reduction correlated to sgRNA constant+sgRNA-564DS-ref excision composition was observed relative to untreated cells which show a 1:1 ratio of WT (C marked in blue)/mutation S126L (T marked in red) transcription. All samples were evaluated in triplicates.

[0101] FIG. 15: Sequences of off-target sites identified by GUIDE-seq for U2OS cells targeting ELANEg35 (sgRNA-constant) site with OMNI50 nuclease. GUIDE-seq sequencing read counts are shown to the right of each site following by target location in human hg38 reference (Chromosome number: position). The on-target site is marked with a black square.

[0102] FIG. 16: Graph showing % of Editing on constant guide panel in U2OS cells treated with SpCas9 or OMNI50 nucleases.

[0103] FIG. 17: Editing analysis of the sgRNA-564DS-ref panel in U2OS cells treated with SpCas9 or OMNI50 nucleases.

[0104] FIG. 18: Editing analysis of the constant guide off targets panel for analysis of patient treated samples with constant guide and sgRNA-564DS-ref.

[0105] FIG. 19: Editing analysis of sgRNA-564DS-ref off targets panel for analysis of patient treated samples with constant guide and sgRNA-564DS-ref.

[0106] FIG. 20: Editing analysis of sgRNA-564DS-Alt off targets panel for analysis of patient treated samples with constant guide and sgRNA-564DS-Alt.

### DETAILED DESCRIPTION

[0107] Embodiments of the present invention provide a method for inactivating in a cell a mutant allele of the elastase, neutrophil expressed gene (ELANE gene) gene having a mutation associated with severe congenital neutropenia (SCN) or cyclic neutropenia (CyN) and which cell is heterozygous at one or more polymorphic sites selected from the group consisting of rs10424470, rs4807932, rs10414837, rs376107533, rs3761010, rs351108, rs3826946, rs10413889, rs3761007, rs10409474, rs3761005, rs351107, rs3761001, rs740021, rs781452480, rs371057361, rs570466264, rs1041904080, rs7250194, rs17216649, rs199720952, rs6510983, rs17223066, rs7255385, rs9749274, rs111361200, rs112639467, rs141213775, rs28591229, rs10469327, rs3834645, rs1683564, rs71335276, and rs8107095, the method comprising
[0108] introducing to the cell a composition comprising:
   [0109] a CRISPR nuclease or a sequence encoding the CRISPR nuclease; and
   [0110] a first RNA molecule comprising a guide sequence portion having 21-30 nucleotides,
[0111] wherein a complex of the CRISPR nuclease and the first RNA molecule affects a double strand break in the mutant allele of the ELANE gene.

[0112] In embodiments of the present invention the guide sequence portion of the first RNA molecule comprises 21-30 contiguous nucleotides containing nucleotides in the sequence set forth in any one of SEQ ID NOs: 1-3751.

[0113] In embodiments of the present invention wherein the cell (or subject) is heterozygous at one or more polymorphic sites selected from the group consisting of: rs9749274, rs740021, rs199720952, rs28591229, rs71335276, rs3826946, rs10413889, rs3761005, rs10409474, rs3761007, rs1683564, rs17216649, rs10469327, rs8107095, rs10414837, and rs10424470, and the guide sequence portion of the first RNA molecule comprises 21-30 contiguous nucleotides containing nucleotides in the sequence set forth in any one of SEQ ID NOs: 1-3751.

[0114] In some embodiments, the polymorphic site is rs1683564 and the guide sequence portion of the first RNA molecule comprises 21-30 contiguous nucleotides containing nucleotides in the sequence set forth in any one of SEQ ID NOs: 2517, 2601, 2464-2516, 2518-2600, 2602-2613, 1-2463, 2614-3751.

[0115] In embodiments of the present invention, the CRISPR nuclease and the first RNA molecule affects a double strand break in the mutant allele of the ELANE gene, which mutant allele is targeted for the double strand break based on the one or more polymorphic sites.

[0116] In embodiments of the present invention, the CRISPR nuclease and the first RNA molecule affects a double strand break in the mutant allele of the ELANE gene, which mutant allele is targeted for the double strand break based on a sequence of the mutant allele at the one or more polymorphic sites.

[0117] In embodiments of the present invention, the CRISPR nuclease and the first RNA molecule affects a double strand break in the mutant allele of the ELANE based on the nucleotide base of the one or more polymorphic sites present on the mutant allele of the ELANE gene.

[0118] Embodiments of the present invention further comprise introduction of a second RNA molecule comprising a guide sequence portion capable of complexing with a CRISPR nuclease, wherein the complex of the second RNA molecule and CRISPR nuclease affects a second double strand break in the ELANE gene. In an embodiment, the second RNA molecule comprises a guide sequence portion having 21-30 nucleotides.

[0119] In embodiments of the present invention, a composition may comprise 1, 2, 3 or more CRISPR nucleases or sequencing encoding the CRISPR nucleases. In embodiments of the present invention, introducing a composition to the cell may comprise introducing 1, 2, 3, or more compositions to the cell. In embodiments of the present invention, each composition may comprise a different CRISPR nuclease or sequence encoding the CRISPR nucleases or the same CRISPR nuclease or sequence encoding the CRISPR nuclease. In embodiments of the present invention involving two RNA molecules, the second RNA molecule may form a complex with the same CRISPR nuclease as the first RNA molecule, or may form a complex with another CRISPR nuclease.

[0120] In embodiments of the present invention, the second double strand break is within a non-coding region of the ELANE gene. In embodiments of the present invention, the non-coding region is in intron 4.

[0121] In embodiments of the present invention, the guide sequence portion of the first RNA molecule comprises 21 contiguous nucleotides containing nucleotides in the sequence set forth in any one of SEQ ID NOs: 1-3751.

[0122] In embodiments of the present invention, the guide sequence portion of the first RNA molecule comprises 22 contiguous nucleotides containing nucleotides in the sequence set forth in any one of SEQ ID NOs: 1-3751.

[0123] According to embodiments of the present invention, the guide sequence portion of the second RNA molecule comprises 21-30 contiguous nucleotides containing nucleotides in the sequence set forth in any one of SEQ ID NOs: 1-3751.

[0124] In embodiments of the present invention, the second double strand break is within a non-coding region of the ELANE gene.

[0125] In embodiments of the present invention, the cell is heterozygous at rs10414837 or rs3761005 and the complex of the second RNA molecule and CRISPR nuclease affects a double strand break in intron 4 of the ELANE gene.

[0126] In embodiments of the present invention, the cell is heterozygous at rs1683564 and the complex of the second RNA molecule and CRISPR nuclease affects a double strand break in intron 4 of the ELANE gene.

[0127] In some embodiments, the cell is heterozygous at the polymorphic sites in the ELANE rs10414837, and a complex of a first RNA molecule comprising a guide sequence portion having 21-30 nucleotides and a CRISPR nuclease affects a double strand break in the mutant allele of the ELANE gene and not in the functional allele of the ELANE gene. In such embodiments the guide sequence portion of the first RNA molecule may comprise a sequence of contiguous nucleotides as set forth in any one of the SEQ ID NOs targeting rs10414837 as listed in Table 1.

[0128] In some embodiments, the cell is heterozygous at the polymorphic sites in the ELANE rs3761005, and a complex of a first RNA molecule comprising a guide sequence portion having 21-22 or 21-30 nucleotides and a CRISPR nuclease affects a double strand break in the mutant allele of the ELANE gene and not in the functional allele of the ELANE gene. In such embodiments the guide sequence portion of the first RNA molecule may comprise a sequence of contiguous nucleotides as set forth in any one of the SEQ ID NOs targeting rs3761005 as listed in Table 1.

[0129] In some embodiments, the cell is heterozygous at the polymorphic sites in the ELANE rs1683564, and a complex of a first RNA molecule comprising a guide sequence portion having 21-22 or 21-30 nucleotides and a CRISPR nuclease affects a double strand break in the mutant allele of the ELANE gene and not in the functional allele of the ELANE gene. In such embodiments the guide sequence portion of the first RNA molecule may comprise a sequence of contiguous nucleotides as set forth in any one of the SEQ ID NOs targeting rs1683564 as listed in Table 1.

[0130] Embodiments of the present invention comprise obtaining the cell with an ELANE gene mutation associated with severe congenital neutropenia (SCN) or CyN from a subject with an ELANE gene mutation related to SCN or CyN and/or suffering from SCN or CyN and which subject is heterozygous at one or more polymorphic sites selected from the group consisting of: rs10424470, rs4807932, rs10414837, rs376107533, rs3761010, rs351108, rs3826946, rs10413889, rs3761007, rs10409474, rs3761005, rs351107, rs3761001, rs740021, rs781452480, rs371057361, rs570466264, rs1041904080, rs7250194, rs17216649, rs199720952, rs6510983, rs17223066, rs7255385, rs9749274, rs111361200, rs112639467, rs141213775, rs28591229, rs10469327, rs3834645, rs1683564, rs71335276, and rs8107095.

[0131] Embodiments of the present invention comprise first selecting a subject with an ELANE gene mutation related to SCN or CyN and/or suffering from SCN or CyN and which subject is heterozygous at one or more polymorphic sites selected from the group consisting of: rs10424470, rs4807932, rs10414837, rs376107533, rs3761010, rs351108, rs3826946, rs10413889, rs3761007, rs10409474, rs3761005, rs351107, rs3761001, rs740021, rs781452480, rs371057361, rs570466264, rs1041904080, rs7250194, rs17216649, rs199720952, rs6510983, rs17223066, rs7255385, rs9749274, rs111361200, rs112639467, rs141213775, rs28591229, rs10469327, rs3834645, rs1683564, rs71335276, and rs8107095, and obtaining the cell from the subject.

[0132] Embodiments of the present invention comprise obtaining the cell from the subject by mobilization and/or by apheresis.

[0133] Embodiments of the present invention comprise obtaining the cell from the subject by bone marrow aspiration.

[0134] In embodiments of the present invention, the cell is prestimulated prior to introducing the composition to the cell.

[0135] Embodiments of the present invention comprise culture expanding the cell to obtain cells.

[0136] In embodiments of the present invention, the cells are cultured with one or more of: stem cell factor (SCF), IL-3, and GM-CSF.

[0137] In embodiments of the present invention, the cells are cultured with at least one cytokine.

[0138] In embodiments of the present invention, the at least one cytokine is a recombinant human cytokine.

[0139] In embodiments of the present invention, the cell is among a plurality of cells, wherein the composition comprising the first RNA molecule or both the first and the second RNA molecule is introduced into at least the cell as well as other cells among the plurality of cells, and the mutant allele of the ELANE gene is inactivated in at least the cell as well as in the other cells among the plurality of cells, thereby obtaining multiple modified cells.

[0140] In embodiments of the present invention, introducing the composition comprising the first RNA molecule or introduction of the second RNA molecule comprises electroporation of the cell or cells.

[0141] Embodiments of the present invention provide for a modified cell obtained by the methods of the present invention.

[0142] In embodiments of the present invention, the modified cells are further culture expanded.

[0143] In embodiments of the present invention, the modified cells are capable of engraftment.

[0144] In embodiments of the invention, modified cells are capable of long-term engraftment when infused into a patient, giving rise to differentiated hematopoietic cells for at least 12 months after infusion, preferably at least 24 months and even more preferably at least 30 months after infusion. In a further embodiment, the modified cells are capable of long-term engraftment when infused into an autologous subject. In a further embodiment, the modified cells are capable of long-term engraftment when infused into a subject without myeloablation. In an embodiment of the present invention, the modified cells are delivered to a subject in sufficient numbers that, when engrafted into a human subject, provide long term engraftment.

[0145] In embodiments of the present invention, the modified cell or cells are capable of giving rise to progeny cells.

[0146] In embodiments of the present invention, the modified cell or cells are capable of giving rise to progeny cells after engraftment.

[0147] In embodiments of the present invention, the modified cell or cells are capable of giving rise to progeny cells after an autologous engraftment.

[0148] In embodiments of the present invention, the modified cell or cells are capable of giving rise to progeny cells for at least 12 months or at least 24 months after engraftment.

[0149] In one embodiment, the cell or cells are stem cells. In one embodiment, the cell is an embryonic stem cell. In some embodiment, the stem cell is a hematopoietic stem/progenitor cell (HSPC).

[0150] In embodiments of the present invention, the modified cell or cells are CD34+ hematopoietic stem cells.

[0151] In embodiments of the present invention, the modified cell or cells are bone marrow cells or peripheral mononucleated cells (PMCs).

[0152] Embodiments of the present invention provide for a modified cell lacking at least a portion of one allele of the ELANE gene.

[0153] In embodiments of the present invention, the modified cell was modified from a cell heterozygous at one or more polymorphic sites selected from the group consisting of: rs10424470, rs4807932, rs10414837, rs376107533, rs3761010, rs351108, rs3826946, rs10413889, rs3761007, rs10409474, rs3761005, rs351107, rs3761001, rs740021, rs781452480, rs371057361, rs570466264, rs1041904080, rs7250194, rs17216649, rs199720952, rs6510983, rs17223066, rs7255385, rs9749274, rs111361200, rs112639467, rs141213775, rs28591229, rs10469327, rs3834645, rs1683564, rs71335276, and rs8107095.

[0154] Embodiments of the present invention provide for a composition comprising modified cells and a pharmaceutically acceptable carrier.

[0155] Embodiments of the present invention provide for an in vitro or ex vivo method of preparing a composition, comprising mixing the cells of the present invention with the pharmaceutically acceptable carrier.

[0156] Embodiments of the present invention provide for a method of preparing in vitro or ex vivo a composition comprising modified cells, the method comprising:
[0157] a) isolating HSPCs from cells obtained from a subject with an ELANE gene mutation related to SCN or CyN and/or suffering from SCN or CyN and which subject is heterozygous at one or more polymorphic sites selected from the group consisting of: rs10424470, rs4807932, rs10414837, rs376107533, rs3761010, rs351108, rs3826946, rs10413889, rs3761007, rs10409474, rs3761005, rs351107, rs3761001, rs740021, rs781452480, rs371057361, rs570466264, rs1041904080, rs7250194, rs17216649, rs199720952, rs6510983, rs17223066, rs7255385, rs9749274, rs111361200, rs112639467, rs141213775, rs28591229, rs10469327, rs3834645, rs1683564, rs71335276, and rs8107095, and obtaining the cell from the subject;
[0158] b) introducing to the cells of step (a) a composition comprising:
   [0159] a CRISPR nuclease or a sequence encoding the CRISPR nuclease; and
   [0160] a first RNA molecule comprising a guide sequence portion having 21-30 nucleotides,
[0161] wherein a complex of the CRISPR nuclease and the first RNA molecule affects a double strand break in the mutant allele of the ELANE gene in one or more cells,
   [0162] optionally, introducing to the cells a second RNA molecule comprising a guide sequence portion capable of complexing with a CRISPR nuclease, wherein the complex of the second RNA molecule and CRISPR nuclease affects a second double strand break in the ELANE gene in the one or more cells
[0163] so as to inactive the mutant allele of the ELANE gene in one or more cells thereby obtaining modified cells; optionally
[0164] c) culture expanding the modified cells of step (b),
[0165] wherein the modified cells are capable of engraftment and giving rise to progeny cells after engraftment.

[0166] Embodiments of the present invention provide for use of a composition prepared in vitro by a method comprising:
[0167] a) isolating HSPCs from cells obtained from a subject with an ELANE gene mutation related to SCN or CyN and/or suffering from SCN or CyN and which subject is heterozygous at one or more polymorphic sites selected from the group consisting of: rs10424470, rs4807932, rs10414837, rs376107533, rs3761010, rs351108, rs3826946, rs10413889, rs3761007, rs10409474, rs3761005, rs351107, rs3761001, rs740021, rs781452480, rs371057361, rs570466264, rs1041904080, rs7250194, rs17216649, rs199720952, rs6510983, rs17223066, rs7255385, rs9749274, rs111361200, rs112639467, rs141213775, rs28591229, rs10469327, rs3834645, rs1683564, rs71335276, and rs8107095;
[0168] b) introducing to the cells of step (a) a composition comprising:
   [0169] a CRISPR nuclease or a sequence encoding the CRISPR nuclease; and
   [0170] a first RNA molecule comprising a guide sequence portion having 21-30 nucleotides,
[0171] wherein a complex of the CRISPR nuclease and the first RNA molecule affects a double strand break in the mutant allele of the ELANE gene in one or more cells,
   [0172] optionally, introducing to the cells a second RNA molecule comprising a guide sequence portion capable of complexing with a CRISPR nuclease, wherein the complex of the second RNA molecule and CRISPR nuclease affects a second double strand break in the ELANE gene in the one or more cells
[0173] so as to inactive the mutant allele of the ELANE gene in one or more cells thereby obtaining modified cells; optionally;
[0174] c) culture expanding the cells of step (b) wherein the modified cells are capable of engraftment and giving rise to progeny cells after engraftment; and
[0175] d) administering to the subject the cells of step (b) or step (c)
[0176] for treating the SCN or CyN in the subject.

[0177] Embodiments of the present invention provide for a method of treating a subject afflicted with SCN or CyN, comprising administration of a therapeutically effective amount of the modified cells, compositions, or the compositions prepared by the methods of the instant invention

[0178] Embodiments of the present invention provide for a method for treating SCN or CyN in a subject with an ELANE gene mutation relating to SCN or CYN in need thereof and which subject is heterozygous at one or more polymorphic sites selected from the group consisting of: rs10424470, rs4807932, rs10414837, rs376107533, rs3761010, rs351108, rs3826946, rs10413889, rs3761007, rs10409474, rs3761005, rs351107, rs3761001, rs740021, rs781452480, rs371057361, rs570466264, rs1041904080, rs7250194, rs17216649, rs199720952, rs6510983, rs17223066, rs7255385, rs9749274, rs111361200, rs112639467, rs141213775, rs28591229, rs10469327, rs3834645, rs1683564, rs71335276, and rs8107095, the method comprising:
[0179] a) isolating HSPCs from cells obtained from the subject;
[0180] b) introducing to the cells of step (a) a composition comprising:
   [0181] a CRISPR nuclease or a sequence encoding the CRISPR nuclease; and
   [0182] a first RNA molecule comprising a guide sequence portion having 21-30 nucleotides,
[0183] wherein a complex of the CRISPR nuclease and the first RNA molecule affects a double strand break in the mutant allele of the ELANE gene in one or more cells,
   [0184] optionally, introducing to the cells a second RNA molecule comprising a guide sequence portion capable of complexing with a CRISPR nuclease, wherein the complex of the second RNA molecule and CRISPR nuclease affects a second double strand break in the ELANE gene in the one or more cells
[0185] so as to inactive the mutant allele of the ELANE gene in one or more cells thereby obtaining modified cells; optionally;
[0186] c) culture expanding the cells of step (b) wherein the modified cells are capable of engraftment and giving rise to progeny cells after engraftment; and
[0187] d) administering to the subject the cells of step (b) or step (c)
[0188] thereby treating the SCN or CyN in the subject.

[0189] Embodiments of the present invention provide for a method for treating SCN or CyN in a subject with an ELANE gene mutation relating to SCN or CYN in need thereof and which subject is heterozygous at one or more polymorphic sites selected from the group consisting of: rs10424470, rs4807932, rs10414837, rs376107533, rs3761010, rs351108, rs3826946, rs10413889, rs3761007, rs10409474, rs3761005, rs351107, rs3761001, rs740021, rs781452480, rs371057361, rs570466264, rs1041904080, rs7250194, rs17216649, rs199720952, rs6510983, rs17223066, rs7255385, rs9749274, rs111361200, rs112639467, rs141213775, rs28591229, rs10469327, rs3834645, rs1683564, rs71335276, and rs8107095, the method comprising
[0190] administering to the subject autologous modified cells or progeny of autologous modified cells, wherein the autologous modified cells are modified so as to have a double strand break in the mutant allele of the ELANE gene,
   [0191] wherein said double strand break results from introduction to the cells of a composition comprising a CRISPR nuclease or a sequence encoding the CRISPR nuclease and a first RNA molecule wherein a complex of the CRISPR nuclease and the first RNA molecule affects a double strand break in the mutant allele of the ELANE gene so as to inactive the mutant allele of the ELANE gene in the cell,
[0192] thereby treating the SCN or CyN in the subject.

[0193] Embodiments of the present invention provide for a method of selecting a subject for treatment from a pool of subjects diagnosed with SCN or CyN, comprising the steps of:
[0194] a) obtaining cells from each subject in the pool of subjects;
[0195] b) screening each subject's cells for an ELANE gene mutation related to SCN or CyN, and selecting only subjects with an ELANE gene mutation related to SCN or CyN;
[0196] c) screening by sequencing the cells of the subjects selected in step (b) for heterozygosity at one or more polymorphic sites selected from the group consisting of: rs10414837, rs3761005, rs1683564,
[0197] d) selecting for treatment only subjects with cells heterozygous at the one of more polymorphic sites.
[0198] e) obtaining HSPC cells from the bone marrow of the subject either by aspiration or by mobilization and apheresis of peripheral blood; and
[0199] f) introducing to the HSPC cells of step (e):
   [0200] one or more CRISPR nucleases or sequences encoding the one or more CRISPR nucleases
   [0201] a first RNA molecule comprising a guide sequence portion having 21-30 contiguous nucleotides containing nucleotides in the sequence set forth in any one of SEQ ID NOs: 1-3751, targeting the nucleotide base of the heterozygous allele of the one or more polymorphic sites present on the mutant allele of the ELANE gene,
[0202] wherein a complex of the first RNA molecule and a CRISPR nuclease affects a first double strand break in the mutant allele of the ELANE gene in one or more of the HSPC cells and a complex of the second RNA molecule and a CRISPR nuclease affect a second double strand break in intron 4 of both alleles of the ELANE gene in the one or more HSPC cells in which the complex of the first RNA molecule and the CRISPR nuclease affected a first double strand break, thereby obtaining modified cells;
[0203] g) administering to the subject the modified cells of step (0,
[0204] thereby treating SCN or CyN in the subject.

[0205] Embodiments of the present invention provide an RNA molecule comprising a guide sequence portion having 21-22 or 21-30 contiguous nucleotides containing nucleotides in the sequence set forth in any one of SEQ ID NOs: 1-3751.

[0206] Embodiments of the present invention further comprise a second RNA molecule comprising a guide sequence portion.

[0207] In embodiments of the present invention, the second RNA molecule targets a non-coding region of the ELANE gene.

[0208] In embodiments of the present invention, the nucleotide sequence of the guide sequence portion of the second RNA molecule is a different nucleotide sequence from the sequence of the guide sequence portion of the first RNA molecule.

[0209] In embodiments of the present invention, the first RNA molecule further comprises a portion having a sequence which binds to a CRISPR nuclease. In embodiments of the present invention, the second RNA molecule further comprise a portion having a sequence which binds to a CRISPR nuclease.

[0210] In an embodiment of the present invention, the CRISPR nuclease has at least 100%, 99%, 98%, 97%, 96%, 95%, 94%, 93%, 92%, 91%, 90%, 85%, 80% identity to SEQ ID NO: 3789.

[0211] In embodiments of the present invention, the sequence which binds to a CRISPR nuclease is a tracrRNA sequence.

[0212] In embodiments of the present invention, the first RNA molecule further comprises a portion having a tracr mate sequence. In embodiments of the present invention, the second RNA molecule further comprises a portion having a tracr mate sequence.

[0213] In embodiments of the present invention, the first RNA molecule further comprises one or more linker portions. In embodiments of the present invention, the second RNA molecule further comprises one or more linker portions.

[0214] In embodiments of the present invention, the first RNA molecule is up to 300 nucleotides in length. In embodiments of the present invention, the second RNA molecule is up to 300 nucleotides in length.

[0215] In embodiments of the present invention, the composition further comprises one or more CRISPR nucleases or sequences encoding the one or more CRISPR nucleases. In embodiments of the present invention, the composition further comprises one or more tracrRNA molecules or sequences encoding the one or more tracrRNA molecules.

[0216] Embodiments of the present invention provide a method for inactivating in a cell a mutant ELANE allele, the method comprising delivering to the cell the RNA molecules or compositions of the present invention.

[0217] In embodiments of the present invention, the one or more CRISPR nuclease or sequences encoding the one or more CRISPR nucleases and the RNA molecule or RNA molecules are delivered to the subject and/or cells substantially at the same time or at different times.

[0218] In embodiments of the present invention, the tracrRNA molecules or sequences encoding the one or more tracrRNA molecules and the RNA molecule or RNA molecules are delivered to the subject and/or cells substantially at the same time or at different times.

[0219] In embodiments of the present invention, the method comprises removing an exon containing a disease-causing mutation from a mutant allele, wherein the first RNA molecule or the first and the second RNA molecules target regions flanking an entire exon or a portion of the exon.

[0220] In embodiments of the present invention, the method comprises removing multiple exons, the entire open reading frame of a gene, or removing the entire gene.

[0221] In embodiments of the present invention, the first RNA molecule or the first and the second RNA molecules target an alternative splicing signal sequence between an exon and an intron of a mutant allele.

[0222] In embodiments of the present invention, the second RNA molecule targets a sequence present in both a mutant allele and a functional allele.

[0223] In embodiments of the present invention, the second RNA molecule targets an intron.

[0224] In embodiments of the present invention, the method results in subjecting the mutant allele to insertion or deletion by an error prone non-homologous end joining (NHEJ) mechanism, generating a frameshift in the mutant allele's sequence.

[0225] In embodiments of the present invention, the frameshift results in inactivation or knockout of the mutant allele.

[0226] In embodiments of the present invention, the frameshift creates an early stop codon in the mutant allele or the frameshift results in nonsense-mediated mRNA decay of the transcript of the mutant allele.

[0227] In embodiments of the present invention, inactivating or treating results in a truncated protein encoded by the mutant allele and a functional protein encoded by the functional allele.

[0228] In embodiments of the present invention, the cells or the subject is heterozygous at rs10414837 or rs3761005 and wherein the complex of the second RNA molecule and CRISPR nuclease affects a double strand break in intron 4 of the ELANE gene.

[0229] In embodiments of the present invention, the cells or the subject is heterozygous at rs1683564 and wherein the complex of the second RNA molecule and CRISPR nuclease affects a double strand break in intron 4 of the ELANE gene.

[0230] Embodiments of the present invention provide use of the RNA molecules, the compositions, or the composition prepared by the method of the present invention for inactivating in a cell a mutant ELANE allele.

[0231] Embodiments of the present invention provide a medicament comprising the RNA molecules, compositions, or the compositions prepared by the methods of the instant invention for use in inactivating in a cell a mutant ELANE allele, wherein the medicament is administered by delivering to the cell the RNA molecules, compositions, or the compositions prepared by the methods of the instant invention.

[0232] Embodiments of the present invention provide for use of the methods, the modified cells, the compositions, or the compositions prepared by the methods, or the RNA molecules of the instant invention for treating ameliorating or preventing SCN or CyN in a subject having or at risk of having SCN or CyN.

[0233] Embodiments of the present invention provide for a medicament comprising the RNA molecules, compositions, compositions prepared by the methods of the instant invention, or the modified cells of the instant invention, for use in treating ameliorating or preventing SCN or CyN, wherein the medicament is administered by delivering to a subject having or at risk of having SCN or CyN the RNA molecules, compositions, compositions prepared by the methods of the instant invention, or the modified cells of the instant invention.

[0234] Embodiments of the present invention provide for a kit for inactivating a mutant ELANE allele in a cell, comprising the RNA molecules of the instant invention, a CRISPR nuclease or sequence encoding the CRISPR nuclease, and/or a tracrRNA molecule or sequence encoding the tracrRNA molecule; and instructions for delivering the RNA molecule; CRISPR nuclease or sequence encoding the CRISPR nuclease, and/or the tracrRNA or sequence encoding the tracrRNA molecule to the cell to inactivate the mutant ELANE allele in the cell.

[0235] Embodiments of the present invention provide for a kit for treating SCN or CyN in a subject, comprising the RNA molecules of the instant invention, a CRISPR nuclease or sequence encoding the CRISPR nuclease, and/or a tracrRNA molecule or sequence encoding the tracrRNA molecule; and instructions for delivering the RNA molecule; CRISPR nuclease or sequence encoding the CRISPR nuclease, and/or the tracrRNA or sequence encoding the tracrRNA molecule to a subject having or at risk of having SCN or CyN so as to treat the SCN or CyN.

[0236] Embodiments of the present invention provide for a kit for inactivating a mutant ELANE allele in a cell, comprising the compositions, the composition prepared by the methods of the instant invention, or the modified cells of the instant invention, and instructions for delivering the composition to the cell so as to inactivate the ELANE gene in the cell.

[0237] Embodiments of the present invention provide for a kit for treating SCN or CyN in a subject, comprising the composition, the compositions prepared by the methods of the instant invention, or the modified cells of the instant invention, and instructions for delivering the compositions, the compositions prepared by the methods of the instant invention, or the modified cells of the instant invention, to a subject having or at risk of having SCN or CyN so as to treat SCN or CyN.

[0238] Embodiments of the present invention provide a method or kit wherein the CRISPR nuclease in the method or kit has greater cleavage activity when used with an RNA molecule comprising a guide sequence portion having 21-23 nucleotides, compared to its cleavage activity when used with an RNA molecule comprising a guide sequence portion having 20 or fewer nucleotides, and/or 24 or more nucleotides. In embodiments, the CRISPR nuclease has greater cleavage activity when used with an RNA molecule comprising a guide sequence portion having 21-22 nucleotides, compared to its cleavage activity when used with an RNA molecule comprising a guide sequence portion having 20 or fewer nucleotides, and/or 23 or more nucleotides. In some embodiments, the CRISPR nuclease has its greatest cleavage activity when used with an RNA molecule comprising a guide sequence portion having 22 nucleotides. In some embodiments, the CRISPR nuclease has its greatest cleavage activity when used with an RNA molecule comprising a guide sequence portion having 21 nucleotides. In some embodiment, the CRISPR nuclease has its greatest cleavage activity when used with an RNA molecule comprising a guide sequence portion having 23 nucleotides. In some embodiment, the CRISPR nuclease has its greatest cleavage activity when used with an RNA molecule comprising a guide sequence portion having 24 nucleotides.

[0239] In embodiments of the present invention wherein the CRISPR nuclease has greater cleavage activity when used with an RNA molecule comprising a guide sequence portion having 21-23 nucleotides, the CRISPR nuclease has at least 95% identity to the amino acid sequence as set forth in SEQ ID NO: 3789 or the sequence encoding the CRISPR nuclease has at least a 95% sequence identity to SEQ ID NO: 3790 or SEQ ID NO: 3791. In embodiments of the present invention, the CRISPR nuclease has at least 100%, 99%, 98%, 97%, 96%, 95%, 94%, 93%, 92%, 91%, 90%, 89%, 88%, 87%, 86%, 85%, 84%, 83%, or 82% identity to the amino acid sequence as set forth in SEQ ID NO: 3789 or the sequence encoding the CRISPR nuclease has at least a 100%, 99%, 98%, 97%, 96%, 95%, 94%, 93%, 92%, 91%, 90%, 89%, 88%, 87%, 86%, 85%, 84%, 83%, or 82% sequence identity to SEQ ID NO: 3790 or SEQ ID NO: 3791.

[0240] In embodiments of the present invention, composition comprising the CRISPR nuclease has one or more of the following features: (a) the composition is in an aqueous solution, (b) the pH of the composition is between 6 and 8; and (d) the composition is free of RNAse.

### Definitions

[0241] Unless otherwise defined, all technical and/or scientific terms used herein have the same meaning as commonly understood by one of ordinary skill in the art to which the invention pertains. Although methods and materials similar or equivalent to those described herein can be used in the practice or testing of embodiments of the invention, exemplary methods and/or materials are described below. In case of conflict, the patent specification, including definitions, will control. In addition, the materials, methods, and examples are illustrative only and are not intended to be necessarily limiting.

[0242] It should be understood that the terms “a” and “an” as used above and elsewhere herein refer to “one or more” of the enumerated components. It will be clear to one of ordinary skill in the art that the use of the singular includes the plural unless specifically stated otherwise. Therefore, the terms “a,” “an” and “at least one” are used interchangeably in this application.

[0243] For purposes of better understanding the present teachings and in no way limiting the scope of the teachings, unless otherwise indicated, all numbers expressing quantities, percentages or proportions, and other numerical values used in the specification and claims, are to be understood as being modified in all instances by the term “about.” Accordingly, unless indicated to the contrary, the numerical parameters set forth in the following specification and attached claims are approximations that may vary depending upon the desired properties sought to be obtained. At the very least, each numerical parameter should at least be construed in light of the number of reported significant digits and by applying ordinary rounding techniques.

[0244] Unless otherwise stated, adjectives such as “substantially” and “about” modifying a condition or relationship characteristic of a feature or features of an embodiment of the invention, are understood to mean that the condition or characteristic is defined to within tolerances that are acceptable for operation of the embodiment for an application for which it is intended. Unless otherwise indicated, the word “or” in the specification and claims is considered to be the inclusive “or” rather than the exclusive or, and indicates at least one of, or any combination of items it conjoins.

[0245] In the description and claims of the present application, each of the verbs, “comprise,” “include” and “have” and conjugates thereof, are used to indicate that the object or objects of the verb are not necessarily a complete listing of components, elements or parts of the subject or subjects of the verb. Other terms as used herein are meant to be defined by their well-known meanings in the art.

[0246] As used herein, the term “heterozygous single nucleotide polymorphism” or “SNP” refers to a single nucleotide position in a genome that differs between paired chromosomes within a population. As used herein the most common or most prevalent nucleotide base at the position is referred to as the reference (REF), wild-type (WT), common, or major form. Less prevalent nucleotide bases at the position are referred to as the alternative (ALT), minor, rare, or variant forms.

[0247] The “guide sequence portion” of an RNA molecule refers to a nucleotide sequence that is capable of hybridizing to a specific target DNA sequence, e.g., the guide sequence portion has a nucleotide sequence which is fully complementary to the DNA sequence being targeted along the length of the guide sequence portion. In some embodiments, the guide sequence portion is 21-22 nucleotides in length. As described in more detail below, the guide sequence portion may also be, for example, 23, 24, 25, 26, 27, 28, 29 or 30 nucleotides in length. The entire length of the guide sequence portion is fully complementary to the DNA sequence being targeted along the length of the guide sequence portion. The guide sequence portion may be part of an RNA molecule that can form a complex with a CRISPR nuclease with the guide sequence portion serving as the DNA targeting portion of the CRISPR complex. When the DNA molecule having the guide sequence portion is present contemporaneously with the CRISPR molecule the RNA molecule is capable of targeting the CRISPR nuclease to the specific target DNA sequence. Each possibility represents a separate embodiment. An RNA molecule can be custom designed to target any desired sequence.

[0248] The term “targets” as used herein, refers to the guide sequence portion of the RNA molecule's preferential hybridization to a nucleic acid having a targeted nucleotide sequence. It is understood that the term “targets” encompasses variable hybridization efficiencies, such that there is preferential targeting of the nucleic acid having the targeted nucleotide sequence, but unintentional off-target hybridization in addition to on-target hybridization might also occur. It is understood that where an RNA molecule targets a sequence, a complex of the RNA molecule and a CRISPR nuclease molecule targets the sequence for nuclease activity.

[0249] In the context targeting a DNA sequence that is present in a plurality of cells, it is understood that the targeting encompasses hybridization of the guide sequence portion of the RNA molecule with the sequence in one or more of the cells, and also encompasses hybridization of the RNA molecule with the target sequence in fewer than all of the cells in the plurality of cells. Accordingly, it is understood that where an RNA molecule targets a sequence in a plurality of cells, a complex of the RNA molecule and a CRISPR nuclease is understood to hybridize with the target sequence in one or more of the cells, and also may hybridize with the target sequence in fewer than all of the cells. Accordingly, it is understood that the complex of the RNA molecule and the CRISPR nuclease introduces a double strand break in relation to hybridization with the target sequence in one or more cells and may also introduce a double strand break in relation to hybridization with the target sequence in fewer than all of the cells. As used herein, the term “modified cells” refers to cells in which a double strand break is effected by a complex of an RNA molecule and the CRISPR nuclease as a result of hybridization with the target sequence, i.e. on-target hybridization.

[0250] In embodiments of the present invention, RNA guide molecule may target the mutant allele based on the nucleotide base present in the polymorphic site on the mutant allele.

[0251] In embodiments of the present invention, an RNA molecule comprises a guide sequence portion having 21-22 contiguous nucleotides containing nucleotides in the sequence set forth in any one of SEQ ID NOs: 1-3751.

[0252] In embodiments of the present invention, an RNA molecule comprises a guide sequence portion having 21-25 or 21-30 contiguous nucleotides containing nucleotides in the sequence set forth in any one of SEQ ID NOs: 1-3751.

[0253] It is understood that in any of the embodiments of the present invention the guide sequence portion of an RNA molecule may comprise 21-22 contiguous nucleotides and contain any sequence set forth in any single sequence of SEQ ID NOs: 1-3751, or in any single sequence from the above groups of sequences.

[0254] As used herein, “contiguous nucleotides” set forth in a SEQ ID NO refers to nucleotides in a sequence of nucleotides in the order set forth in the SEQ ID NO without any intervening nucleotides.

[0255] In embodiments of the present invention, the guide sequence portion may be 21 or 22 nucleotides in length and consists of 21 or 22 nucleotides in the sequences set forth in any one of SEQ ID NOs: 1-3751. In embodiments of the present invention, the guide sequence portion may be less than 21 nucleotides in length. For example, in embodiments of the present invention the guide sequence portion may be 17, 18, 19 or 20 nucleotides in length. In such embodiments the guide sequence portion may consist of 17, 18, 19 or 20 nucleotides, respectively, in the sequences set forth in any one of SEQ ID NOs: 1-3751.

[0256] In embodiments of the present invention, the guide sequence portion may be 21 nucleotides in length and contains contiguous nucleotides within the sequence set forth in any one of SEQ ID NOs: 1-3751. In embodiments of the present invention, the guide sequence portion may be 22 nucleotides in length and contains contiguous nucleotides within the sequence set forth in any one of SEQ ID NOs: 1-3751. In embodiments of the present invention, the guide sequence portion may be 21-30 nucleotides in length and contains contiguous nucleotides within the sequence set forth in any one of SEQ ID NOs: 1-3751.

[0257] In embodiments of the present invention, the guide sequence portion may be greater than 22 nucleotides in length. For example, in embodiments of the present invention the guide sequence portion may be 23, 24, 25, 26, 27, 28, 29 or 30 nucleotides in length. In such embodiments the guide sequence portion comprises 21-22 contiguous nucleotides containing nucleotides in the sequence set forth in any one of SEQ ID NOs: 1-3751, and additional nucleotides fully complimentary to a nucleotide or sequence of nucleotides adjacent to the 3′ end of the target sequence, 5′ end of the target sequence, or both.

[0258] In embodiments of the present invention, a CRISPR nuclease and an RNA molecule comprising a guide sequence portion form a CRISPR complex that binds to a target DNA sequence to effect cleavage of the target DNA sequence. CRISPR nucleases, e.g. Cpf1, may form a CRISPR complex comprising a CRISPR nuclease and RNA molecule without a further tracrRNA molecule. Alternatively, CRISPR nucleases, e.g. Cas9, may form a CRISPR complex between the CRISPR nuclease, an RNA molecule, and a tracrRNA molecule.

[0259] In embodiments of the present invention, the RNA molecule may further comprise the sequence of a tracrRNA molecule. Such embodiments may be designed as a synthetic fusion of the guide portion of the RNA molecule and the trans-activating crRNA (tracrRNA). (See Jinek (2012) Science). Embodiments of the present invention may also form CRISPR complexes utilizing a separate tracrRNA molecule and a separate RNA molecule comprising a guide sequence portion.

[0260] In such embodiments the tracrRNA molecule may hybridize with the RNA molecule via base pairing and may be advantageous in certain applications of the invention described herein.

[0261] The term “tracr mate sequence” refers to a sequence sufficiently complementary to a tracrRNA molecule so as to hybridize to the tracrRNA via basepairing and promote the formation of a CRISPR complex. (See U.S. Pat. No. 8,906,616). In embodiments of the present invention, the RNA molecule may further comprise a portion having a tracr mate sequence.

[0262] According to embodiments of the present invention, an RNA molecule may be up to 300, 290, 280, 270, 260, 250, 240, 230, 220, 210, 200, 190, 180, 170, 160, 150, 140, 130, 120, 110, or 100 nucleotides in length. Each possibility represents a separate embodiment. In embodiments of the present invention, the RNA molecule may be 17 up to 300 nucleotides in length, 100 up to 300 nucleotides in length, 150 up to 300 nucleotides in length, 200 up to 300 nucleotides in length, 100 to 200 nucleotides in length, or 150 up to 250 nucleotides in length. Each possibility represents a separate embodiment.

[0263] A “gene,” for the purposes of the present disclosure, includes a DNA region encoding a gene product, as well as all DNA regions which regulate the production of the gene product, whether or not such regulatory sequences are adjacent to coding and/or transcribed sequences. Accordingly, a gene includes, but is not necessarily limited to, promoter sequences, terminators, translational regulatory sequences such as ribosome binding sites and internal ribosome entry sites, enhancers, silencers, insulators, boundary elements, replication origins, matrix attachment sites and locus control regions.

[0264] “Eukaryotic” cells include, but are not limited to, fungal cells (such as yeast), plant cells, animal cells, mammalian cells and human cells.

[0265] As used herein, the term HSPC refers to both hematopoietic stem cells and hematopoietic stem progenitor cells. Non-limiting examples of stem cells include a bone marrow cell, a myeloid progenitor cell, a multipotent progenitor cell, a lineage restricted progenitor cell.

[0266] As used herein, “progenitor cell” refers to a lineage cell that is derived from stem cell and retains mitotic capacity and multipotency (e.g., can differentiate or develop into more than one but not all types of mature lineage of cell). As used herein “hematopoiesis” or “hemopoiesis” refers to the formation and development of various types of blood cells (e.g., red blood cells, megakaryocytes, myeloid cells (e.g., monocytes, macrophages and neutrophil), and lymphocytes) and other formed elements in the body (e.g., in the bone marrow).

[0267] The term “nuclease” as used herein refers to an enzyme capable of cleaving the phosphodiester bonds between the nucleotide subunits of nucleic acid. A nuclease may be isolated or derived from a natural source. The natural source may be any living organism. Alternatively, a nuclease may be a modified or a synthetic protein which retains the phosphodiester bond cleaving activity. Gene modification can be achieved using a nuclease, for example a CRISPR nuclease.

[0268] In embodiments of the present invention, an RNA molecule is designed to target a heterozygous polymorphic site present in the mutant allele of the ELANE gene, wherein the RNA molecule targets the nucleotide base, REF or ALT, of the heterozygous polymorphic site present in the mutant allele of the ELANE gene

[0269] The present disclosure provides a method for utilizing at least one naturally occurring nucleotide difference or polymorphism (e.g., single nucleotide polymorphism (SNP)) for distinguishing/discriminating between two alleles of a gene, one allele bearing a mutation such that it encodes a mutated protein causing a disease phenotype (“mutant allele”), and the other allele encoding for a functional protein (“functional allele”). The method further comprises the step of knocking out expression of the mutated protein and allowing expression of the functional protein. In some embodiments, the method is for treating, ameliorating, or preventing a dominant negative genetic disorder.

[0270] Embodiments of the present invention provide methods for utilizing at least one heterozygous SNP in a gene expressing a dominant mutant allele in a given cell or subject. In embodiments of the present invention, the SNP utilized may or may not be associated with a disease phenotype. In embodiments of the present invention, an RNA molecule comprising a guide sequence targets the mutant allele of the gene by targeting the nucleotide base present at a heterozygous SNP in the mutant allele of the gene and therefore having a different nucleotide base in the functional allele of the gene.

[0271] According to embodiments of the present invention, the first RNA molecule targets a first heterozygous SNP present in an exon or promoter of the ELANE gene wherein the first RNA molecule targets the nucleotide base, REF or ALT, of the first SNP present in the mutant allele of the ELANE gene, and wherein the second RNA molecule targets a second heterozygous SNP present in the same or a different exon or an intron of the ELANE gene wherein the second RNA molecule targets the nucleotide base, REF or ALT, of the second SNP present in the mutant allele of the ELANE gene, or a the second RNA molecule targets a sequence in a non-coding region present in both the mutant or functional allele.

[0272] According to embodiments of the present invention, the first RNA molecule or the first and the second RNA molecules target a heterozygous SNP present in the promoter region, the start codon, or the untranslated region (UTR) of the ELANE gene wherein the RNA molecule targets the nucleotide base, REF or ALT, of the SNP present in the mutant allele of the ELANE gene.

[0273] According to embodiments of the present invention, the first RNA molecule or the first and the second RNA molecules targets at least a portion of the promoter and/or the start codon and/or a portion of the UTR of the mutant allele of the ELANE gene.

[0274] According to embodiments of the present invention, the first RNA molecule targets a portion of the promoter, a first heterozygous SNP present in the promoter of the ELANE gene, or a heterozygous SNP present upstream to the promoter of the ELANE gene and the second RNA molecule targets a second heterozygous SNP, which is present in the ELANE gene downstream of the first heterozygous SNP, and is in the promoter, in the UTR, or in an intron or in an exon of the ELANE gene, wherein the first RNA molecule targets the nucleotide base, REF or ALT, of the first SNP present in the mutant allele of the of the ELANE gene, wherein the second RNA molecule targets the nucleotide base, REF or ALT, of the second SNP present in the mutant allele of the ELANE gene.

[0275] According to embodiments of the present invention, the first RNA molecule targets a heterozygous SNP present in the promoter, upstream of the promoter, or the UTR of a the ELANE gene wherein the RNA molecule targets the nucleotide base, REF or ALT, of the SNP present in the mutant allele of the ELANE gene and the second RNA molecule is designed to target a sequence which is present in an intron of both the mutant allele and the functional allele of the ELANE gene.

[0276] According to embodiments of the present invention, the first RNA molecule targets a sequence upstream of the promotor which is present in both a mutant and functional allele of the ELANE gene and the second RNA molecule targets a heterozygous SNP present in any location of the of the ELANE gene wherein the second RNA molecule targets the nucleotide base, REF or ALT, of the SNP present in the mutant allele of the ELANE gene.

[0277] According to embodiments of the present invention, there is provided a method comprising removing an exon containing a disease-causing mutation from a mutant allele, wherein the first RNA molecule or the first and the second RNA molecules target regions flanking an entire exon or a portion of the exon.

[0278] According to embodiments of the present invention, there is provided a method comprising removing multiple exons, the entire open reading frame of a gene, or removing the entire gene.

[0279] According to embodiments of the present invention, the first RNA molecule targets a first heterozygous SNP present in an exon or promoter of the ELANE gene, and wherein the second RNA molecule targets a second heterozygous SNP present in the same or a different exon or in an intron of the ELANE gene wherein the second RNA molecule targets the nucleotide base, REF or ALT, of the second SNP present in the mutant allele of the ELANE gene, or the second RNA molecule targets a sequence in an intron present in both the mutant and functional allele of the ELANE gene.

[0280] According to embodiments of the present invention, the first RNA molecule or the first and the second RNA molecules target an alternative splicing signal sequence between an exon and an intron of a mutant allele.

[0281] According to embodiments of the present invention, the second RNA molecule targets a sequence present in both a mutant allele and a functional allele of the ELANE gene.

[0282] According to embodiments of the present invention, the second RNA molecule targets an intron.

[0283] According to embodiments of the present invention, there is provided a method comprising subjecting the mutant allele to insertion or deletion by an error prone non-homologous end joining (NHEJ) mechanism, generating a frameshift in the mutant allele's sequence.

[0284] According to embodiments of the present invention, the frameshift results in inactivation or knockout of the mutant allele.

[0285] According to embodiments of the present invention, the frameshift creates an early stop codon in the mutant allele.

[0286] According to embodiments of the present invention, the frameshift results in nonsense-mediated mRNA decay of the transcript of the mutant allele.

[0287] According to embodiments of the present invention, the inactivating or treating results in a truncated protein encoded by the mutant allele and a functional protein encoded by the functional allele.

[0288] The compositions and methods of the present disclosure may be utilized for treating, preventing, ameliorating, or slowing progression of SCN or CyN.

[0289] In some embodiments, a mutant allele is deactivated by delivering to a cell an RNA molecule which targets a heterozygous SNP present in the promoter region, the start codon, or the untranslated region (UTR) of the ELANE gene wherein the RNA molecule targets the nucleotide base, REF or ALT, of the SNP present in the mutant allele of the ELANE gene.

[0290] In some embodiments, a mutant allele is inactivated by removing at least a portion of the promoter and/or removing the start codon and/or a portion of the UTR. In some embodiments, the method of deactivating a mutant allele comprises removing at least a portion of the promoter. In such embodiments one RNA molecule may be designed for targeting a first heterozygous SNP present in the promoter or upstream to the promoter of the ELANE gene and another RNA molecule is designed to target a second heterozygous SNP, which is downstream of the first SNP, and is present in the promoter, in the UTR, or in an intron or in an exon of the ELANE gene. Alternatively, one RNA molecule may be designed for targeting a heterozygous SNP present in the promoter, or upstream of the promoter, or the UTR of the ELANE gene and another RNA molecule is designed to target a sequence which is present in an intron of both the mutant allele and the functional allele of the ELANE gene. Alternatively, one RNA molecule may be designed for targeting a sequence upstream of the promotor which is present in both the mutant and functional allele and the other guide is designed to target a heterozygous SNP present in any location of the ELANE gene e.g., in an exon, intron, UTR, or downstream of the promoter of the ELANE gene wherein the RNA molecule targets the nucleotide base, REF or ALT, of the SNP present in the mutant allele of the ELANE gene.

[0291] In some embodiments, the method of deactivating a mutant allele comprises an exon skipping step comprising removing an exon containing a disease-causing mutation from the mutant allele. Removing an exon containing a disease-causing mutation in the mutant allele requires two RNA molecules which target regions flanking the entire exon or a portion of the exon. Removal of an exon containing the disease-causing mutation may be designed to eliminate the disease-causing action of the protein while allowing for expression of the remaining protein product which retains some or all of the wild-type activity. As an alternative to single exon skipping, multiple exons, the entire open reading frame or the entire gene can be excised using two RNA molecules flanking the region desired to be excised.

[0292] In some embodiments, the method of deactivating a mutant allele comprises delivering two RNA molecules to a cell, wherein one RNA molecule targets a first heterozygous SNP present in an exon or promoter of the ELANE gene wherein the RNA molecule targets the nucleotide base, REF or ALT, of the first SNP present in the mutant allele of the ELANE gene, and wherein the other RNA molecule targets a second heterozygous SNP present in the same or a different exon or in an intron of the ELANE gene wherein the RNA molecule targets the nucleotide base, REF or ALT, of the second SNP present in the mutant allele of the ELANE gene, or the second RNA molecule targets a sequence in an intron present in both the mutant or functional allele.

[0293] In some embodiments, an RNA molecule is used to target a CRISPR nuclease to an alternative splicing signal sequence between an exon and an intron of a mutant allele, thereby destroying the alternative splicing signal sequence in the mutant allele.

[0294] Any one of, or combination of, the above-mentioned strategies for deactivating a mutant allele may be used in the context of the invention.

[0295] Additional strategies may be used to deactivate a mutant allele. For example, in embodiments of the present invention, an RNA molecule is used to direct a CRISPR nuclease to an exon or a splice site of a mutant allele in order to create a double-stranded break (DSB), leading to insertion or deletion of nucleotides by an error-prone non-homologous end-joining (NHEJ) mechanism and formation of a frameshift mutation in the mutant allele. The frameshift mutation may result in: (1) inactivation or knockout of the mutant allele by generation of an early stop codon in the mutant allele, resulting in generation of a truncated protein; or (2) nonsense mediated mRNA decay of the transcript of the mutant allele. In further embodiments, one RNA molecule is used to direct a CRISPR nuclease to a promotor of a mutant allele.

[0296] In some embodiments, the method of deactivating a mutant allele further comprises enhancing activity of the functional protein such as by providing a protein/peptide, a nucleic acid encoding a protein/peptide, or a small molecule such as a chemical compound, capable of activating/enhancing activity of the functional protein.

[0297] According to some embodiments, the present disclosure provides an RNA molecule which binds to/associates with and/or directs the RNA guided DNA nuclease e.g., CRISPR nuclease to a sequence comprising at least one nucleotide which differs between a mutant allele and a functional allele (e.g., heterozygous SNP) of a gene of interest (i.e., a sequence of the mutant allele which is not present in the functional allele).

[0298] In some embodiments, the method comprises the steps of: contacting a mutant allele of a gene of interest with an allele-specific RNA molecule and a CRISPR nuclease e.g., a Cas9 protein, wherein the allele-specific RNA molecule and the CRISPR nuclease e.g., Cas9 associate with a nucleotide sequence of the mutant allele of the gene of interest which differs by at least one nucleotide from a nucleotide sequence of a functional allele of the gene of interest, thereby modifying or knocking-out the mutant allele.

[0299] In some embodiments, the allele-specific RNA molecule and a CRISPR nuclease is introduced to a cell encoding the gene of interest. In some embodiments, the cell encoding the gene of interest is in a mammalian subject. In some embodiments, the cell encoding the gene of interest is in a plant.

[0300] In some embodiments, the cleaved mutant allele is further subjected to insertion or deletion (indel) by an error prone non-homologous end joining (NHEJ) mechanism, generating a frameshift in the mutant allele's sequence. In some embodiments, the generated frameshift results in inactivation or knockout of the mutant allele. In some embodiments, the generated frameshift creates an early stop codon in the mutant allele and results in generation of a truncated protein. In such embodiments, the method results in the generation of a truncated protein encoded by the mutant allele and a functional protein encoded by the functional allele. In some embodiments, a frameshift generated in a mutant allele using the methods of the invention results in nonsense-mediated mRNA decay of the transcript of the mutant allele.

[0301] In some embodiments, the mutant allele is an allele of the “elastase, neutrophil expressed” gene (ELANE gene). In some embodiments, the RNA molecule targets a heterozygous SNP of the ELANE gene which co-exists with/is genetically linked to the mutated sequence associated with SCN or CyN genetic disorder. In some embodiments, the RNA molecule targets a heterozygous SNP of the ELANE gene, wherein the heterozygosity of said SNP is highly prevalent in the population. In embodiments of the present invention, the REF nucleotide is prevalent in the mutant allele and not in the functional allele of an individual subject to be treated. In embodiments of the present invention, the ALT nucleotide is prevalent in the mutant allele and not in the functional allele of an individual subject to be treated. In some embodiments, a disease-causing mutation within a mutant ELANE allele is targeted.

[0302] In embodiments of the present invention, the heterozygous SNP may or may not be associated with an ELANE related disease phenotype. In embodiments of the present invention, the heterozygous SNP is associated with an ELANE related disease phenotype. In embodiments of the present invention, the SNP is not associated with an ELANE related disease phenotype

[0303] In some embodiments, the heterozygous SNP is within an exon of the gene of interest. In such embodiments, a guide sequence portion of an RNA molecule may be designed to target the exon of the gene of interest.

[0304] In some embodiments, a heterozygous SNP is within an intron or an exon of the gene of interest. In some embodiments, a heterozygous SNP is in a splice site between the intron and the exon. In some embodiments a heterozygous SNP is in a PAM site of the gene of interest.

[0305] A skilled artisan will appreciate that in each of the embodiments of the present invention, individually, each of the RNA molecules of the present invention are capable of complexing with a nuclease, e.g. a CRISPR nuclease, such as to associate with a target genomic DNA sequence of interest next to a protospacer adjacent motif (PAM). The nuclease then mediates cleavage of target DNA to create a double-stranded break within the protospacer. Accordingly, in embodiments of the present invention, the guide sequences and RNA molecules of the present invention may target a location 1, 2, 3, 4, 5, 6, 7, 8, 9, 10, 11, 12, 13, 14, 15, 16, 17, 18, 19, 20, 21, 22, 23, 24, 25, 26, 27, or 28 nucleotides upstream or downstream from a PAM site.

[0306] Therefore, in embodiments of the present invention, the RNA molecules of the present invention in complex with a nuclease, e.g., a CRISPR nuclease, may affect a double strand break in an allele of a gene 1, 2, 3, 4, 5, 6, 7, 8, 9, 10, 11, 12, 13, 14, 15, 16, 17, 18, 19, 20, 21, 22, 23, 24, 25, 26, 27, 28 upstream or downstream from a target site. A skilled artisan will appreciate that where a heterozygous polymorphic site is present and is used to define the target, an RNA molecule may be designed to target and affect a double stranded break in only the REF or ALT nucleotide base of the heterozygous polymorphic site.

[0307] Where the heterozygous polymorphic site is within the PAM site, it is understood that the RNA molecule may be designed to target a sequence 1, 2, 3, 4, 5, 6, 7, 8, 9, 10, 11, 12, 13, 14, 15, 16, 17, 18, 19, 20, 21, 22, 23, 24, 25, 26, 27, or 28 nucleotides upstream or downstream from the PAM site, and a complex of the RNA molecule and nuclease is designed to target only one of the REF or ALT nucleotide base of the heterozygous polymorphic site in the PAM site and effect a break in the PAM site, e.g. the tracrRNA is designed to target one of the REF or ALT nucleotide base of the heterozygous polymorphic site.

[0308] In embodiments of the present invention, an RNA molecule is designed to target a heterozygous polymorphic site present in the ELANE gene, wherein the RNA molecule and/or the complex of the RNA molecule and a CRISPR nuclease targets the nucleotide base, REF or ALT, of the heterozygous polymorphic site present in the mutant allele of the ELANE gene

[0309] In embodiments of the present invention, the RNA molecules, compositions, methods, cells, kits, or medicaments are utilized for treating a subject having a disease phenotype resulting from the heterozygote ELANE gene. In embodiments of the present invention, the disease is SCN or CyN. In such embodiments, the method results in improvement, amelioration or prevention of the disease phenotype.

[0310] In embodiments of the present invention, the RNA molecules, compositions, methods, cells, kits, or medicaments of the present invention are utilized in combination with a second therapy for SCN or CyN to treat the subject. In embodiments of the present invention, the RNA molecules, compositions, methods, kits, or medicaments of the present invention are administered prior to administration of the second therapy, during administration of the second therapy, and/or after administration of the second therapy.

[0311] In embodiments of the present invention, the RNA molecules, compositions, methods, cells, kits, or medicaments of the present invention are administered in combination with Granulocyte colony-stimulating factor (G-CSF) therapy.

[0312] Embodiments referred to above refer to a CRISPR nuclease, RNA molecule(s), and tracrRNA being effective in a subject or cells at the same time. The CRISPR, RNA molecule(s), and tracrRNA can be delivered substantially at the same time or can be delivered at different times but have effect at the same time. For example, this includes delivering the CRISPR nuclease to the subject or cells before the RNA molecule and/or tracr RNA is substantially extant in the subject or cells.

[0313] According to embodiments of the present invention, there is provided a method for inactivating in a cell a mutant allele of the ELANE gene, the method comprising the steps of:
[0314] a) selecting a cell with an ELANE gene mutation associated with SCN or CyN and who is heterozygous at one or more polymorphic sites in the ELANE gene selected from the group consisting of: rs10424470, rs4807932, rs10414837, rs376107533, rs3761010, rs351108, rs3826946, rs10413889, rs3761007, rs10409474, rs3761005, rs351107, rs3761001, rs740021, rs781452480, rs371057361, rs570466264, rs1041904080, rs7250194, rs17216649, rs199720952, rs6510983, rs17223066, rs7255385, rs9749274, rs111361200, rs112639467, rs141213775, rs28591229, rs10469327, rs3834645, rs1683564, rs71335276, and rs8107095;
[0315] b) introducing to the cell a composition comprising:
   [0316] a CRISPR nuclease or sequence encoding the CRISPR nuclease, and
   [0317] a first RNA molecule comprising a guide sequence portion having 21-30 nucleotides,
[0318] wherein a complex of the CRISPR nuclease and the first RNA molecule affects a double strand break in the mutant allele of the ELANE gene and not in the functional allele of the ELANE gene in the cell;
[0319] thereby inactivating the mutant allele of the ELANE gene in the cell.

[0320] According to embodiments of the present invention, there is provided a method for inactivating in a cell a mutant allele of the ELANE gene, the method comprising the steps of:
[0321] a) selecting a cell with an ELANE gene mutation associated with SCN or CyN and who is heterozygous at one or more polymorphic sites in the ELANE gene selected from the group consisting of: rs10424470, rs4807932, rs10414837, rs376107533, rs3761010, rs351108, rs3826946, rs10413889, rs3761007, rs10409474, rs3761005, rs351107, rs3761001, rs740021, rs781452480, rs371057361, rs570466264, rs1041904080, rs7250194, rs17216649, rs199720952, rs6510983, rs17223066, rs7255385, rs9749274, rs111361200, rs112639467, rs141213775, rs28591229, rs10469327, rs3834645, rs1683564, rs71335276, and rs8107095;
[0322] b) introducing to the cell a composition comprising:
   [0323] a CRISPR nuclease or sequence encoding the CRISPR nuclease, and
   [0324] a first RNA molecule comprising a guide sequence portion having 21-30 nucleotides,
[0325] wherein a complex of the CRISPR nuclease and the first RNA molecule affects a double strand break in the mutant allele of the ELANE gene and not in the functional allele of the ELANE gene in the cell;
[0326] and wherein the method further comprises introduction of a second RNA molecule comprising a guide sequence portion capable of complexing with a CRISPR nuclease, wherein the complex of the second RNA molecule and the CRISPR nuclease affects a second double strand break in the ELANE gene;
   thereby inactivating the mutant allele of the ELANE gene in the cell.

[0327] According to embodiments of the present invention, there is provided a method for inactivating in a cell a mutant allele of the ELANE gene having a mutation associated with SCN or CyN and which cell is heterozygous at one or more polymorphic sites in the ELANE gene selected from the group consisting of: rs10424470, rs4807932, rs10414837, rs376107533, rs3761010, rs351108, rs3826946, rs10413889, rs3761007, rs10409474, rs3761005, rs351107, rs3761001, rs740021, rs781452480, rs371057361, rs570466264, rs1041904080, rs7250194, rs17216649, rs199720952, rs6510983, rs17223066, rs7255385, rs9749274, rs111361200, rs112639467, rs141213775, rs28591229, rs10469327, rs3834645, rs1683564, rs71335276, and rs8107095, the method comprising
[0328] introducing to the cell a composition comprising:
   [0329] a CRISPR nuclease or sequence encoding the CRISPR nuclease, and
   [0330] a first RNA molecule comprising a guide sequence portion having 21-30 nucleotides,
[0331] wherein a complex of the CRISPR nuclease and the first RNA molecule affects a double strand break in the mutant allele of the ELANE gene;
[0332] thereby inactivating the mutant allele of the ELANE gene in the cell.

[0333] According to embodiments of the present invention, there is provided a method for inactivating in a cell a mutant allele of the ELANE gene with an ELANE gene mutation associated with SCN or CyN and heterozygous at one or more polymorphic sites in the ELANE gene selected from the group consisting of: rs10424470, rs4807932, rs10414837, rs376107533, rs3761010, rs351108, rs3826946, rs10413889, rs3761007, rs10409474, rs3761005, rs351107, rs3761001, rs740021, rs781452480, rs371057361, rs570466264, rs1041904080, rs7250194, rs17216649, rs199720952, rs6510983, rs17223066, rs7255385, rs9749274, rs111361200, rs112639467, rs141213775, rs28591229, rs10469327, rs3834645, rs1683564, rs71335276, and rs8107095, the method comprising:
[0334] introducing to the cell a composition comprising:
   [0335] a CRISPR nuclease or sequence encoding the CRISPR nuclease, and
   [0336] a first RNA molecule comprising a guide sequence portion having 21-30 nucleotides,
[0337] wherein a complex of the CRISPR nuclease and the first RNA molecule affects a double strand break in the mutant allele of the ELANE gene;
[0338] and wherein the method further comprises introduction of a second RNA molecule comprising a guide sequence portion capable of complexing with a CRISPR nuclease, wherein the complex of the second RNA molecule and CRISPR nuclease affects a second double strand break in the ELANE gene;
[0339] thereby inactivating the mutant allele of the ELANE gene in the cell.

[0340] In embodiments of the present invention, a complex of the CRISPR nuclease and the first RNA molecule affects a double strand break in the mutant allele of the ELANE gene and not in the functional allele of the ELANE gene in the cell.

[0341] In embodiments of the present invention, the cell is also heterozygous at least one additional polymorphic site in the ELANE gene selected from the group consisting of rs10424470, rs4807932, rs10414837, rs376107533, rs3761010, rs351108, rs3826946, rs10413889, rs3761007, rs10409474, rs3761005, rs351107, rs3761001, rs740021, rs781452480, rs371057361, rs570466264, rs1041904080, rs7250194, rs17216649, rs199720952, rs6510983, rs17223066, rs7255385, rs9749274, rs111361200, rs112639467, rs141213775, rs28591229, rs10469327, rs3834645, rs1683564, rs71335276, and rs8107095.

[0342] In embodiments of the present invention, a cell with an ELANE gene mutation associated with SCN or CyN may be from a subject with the ELANE gene mutation and/or afflicted with SCN or CyN. Accordingly, selecting a cell with an ELANE gene mutation may comprise selecting a subject with the ELANE gene mutation. In further embodiments of the present invention, selecting a cell may comprise selecting a cell from a subject with the ELANE gene mutation. In embodiments of the present invention, introducing the compositions of the subject invention to the cell may comprise introducing the compositions of the invention to the cell of a subject afflicted with the ELANE gene mutation.

[0343] Accordingly, in embodiments of the present invention, there is provided a method for inactivating in a cell a mutant allele of the ELANE gene of a subject, the method comprising the step of selecting a subject with an ELANE gene mutation resulting in SCN or CyN and who is heterozygous at one or more polymorphic sites in the ELANE gene selected from the group consisting of: rs10424470, rs4807932, rs10414837, rs376107533, rs3761010, rs351108, rs3826946, rs10413889, rs3761007, rs10409474, rs3761005, rs351107, rs3761001, rs740021, rs781452480, rs371057361, rs570466264, rs1041904080, rs7250194, rs17216649, rs199720952, rs6510983, rs17223066, rs7255385, rs9749274, rs111361200, rs112639467, rs141213775, rs28591229, rs10469327, rs3834645, rs1683564, rs71335276, and rs8107095.

[0344] Accordingly, embodiments of the present invention encompass the screening of subjects or cells for the ELANE gene. A person having ordinary skill in the art would readily understand methods of screening for mutations within the ELANE gene in the art, by way of non-limiting examples, e.g., sequencing-by-synthesis, Sanger sequencing, karyotyping, Fluorescence In situ Hybridization, and/or microarray testing. In embodiments of the present invention, mutations within the ELANE gene are screened by exon sequencing.

[0345] In embodiments of the present invention, the subject is or has been diagnosed with SCN or CyN by measuring the absolute neutrophil count (ANC) in peripheral blood. In embodiments of the present invention, SCN is or was diagnosed before the subject reaches the age 6 months. In embodiments of the present invention, CyN is or was diagnosed between the ages of 12 and 24 months, or after the age of 24 months. In embodiments of the present invention, SCN or Cyn is diagnosed by one or more of recurrent acute stomatologic disorders. In embodiments of the present invention, SCN or CyN is diagnosed by bone marrow examination, preferably the bone marrow examination is a cytogenetic bone marrow study. In embodiments of the present invention, SCN or CyN is diagnosed by one or more of: antineutrophil antibody assay, immunoglobulin assay (Ig GAM), lymphocyte immunophenotyping, pancreatic markers (serum trypsinogen and fecal elastase) and liposoluble vitamin levels (vitamins A, E and D). It is understood that any diagnostic method may be used with any other diagnostic method.

[0346] In embodiments of the present invention, a subject diagnosed with SCN or CyN is screened by Exon sequencing to identify an ELANE pathogenic mutation in the ELANE gene. In further embodiments the subject is screened by Sanger sequencing to confirm heterozygocity of at least one SNP in Table 1. In embodiments of the present invention, the SNP is one of rs1683564, rs10414837, and rs3761005. In embodiments of the present invention, the nucleotide of the heterozygous SNP on the mutant allele of the ELANE gene determined using BAC bio. In embodiments of the present invention, appropriate guides are selected according to Table 1. In embodiments of the present invention, the guides selected are introduced to cells, e.g. PBMCs, obtained from the subject and reduction in the pathogenic ELANE mutation in the cells is measured by, e.g. Next Generation Sequencing.

[0347] It is understood that the CRISPR/Cas9 gene editing system enables targeting the nuclease to a target site in a sequence specific manner to address disease-causing mutations. Hematopoietic stem and progenitor cells (HSPCs) have therapeutic potential because of their ability to both self-renew and differentiate (Yu, Natanson, and Dunbar 2016). Accordingly, embodiments of the present invention apply genome editing to HSPCs.

[0348] In embodiments of the present invention, an autologous therapy and utilizes autologous CD34+ hematopoietic stem cells from patients diagnosed with SCN or CyN which are edited with CRISPR/Cas9. In embodiments of the present invention, CD34+ cells are isolated from bone marrow or peripheral blood mononucleated cells (PBMCs) following patient apheresis.

[0349] In the case of dominant negative (or compound heterozygous) indications, such as SCN or CyN, the strategy is to edit the mutant allele and avoid cleavage in the non-mutant allele or other off targets by targeting a heterozygous SNP sequence.

[0350] Embodiments of the present invention may include the following steps:
[0351] selection of a patient diagnosed with SCN or CyN identified as exhibiting heterozygosity in at least one of the SNPs of Table 1 hereinbelow. In embodiments of the present invention, the subject is heterozygous at rs10414837, rs3761005, or rs1683564;
[0352] selection of a therapeutic strategy based on the identified heterozygous SNP position of the candidate patient;
[0353] obtaining HSPC cells from the bone marrow of the subject either by aspiration or by mobilization and apheresis of peripheral blood, optionally, the HSPC cells are processed (e.g., enriched, stimulated, both);
[0354] introducing into the HSPC cells (e.g., by ex vivo electroporation) a composition comprising:
   [0355] a CRISPR nuclease or a sequence encoding the same (e.g., mRNA),
   [0356] a discriminatory RNA molecule that targets a particular sequence in the identified heterozygous SNP position of the mutant allele (REF/ALT sequence), and
   [0357] a non-discriminatory RNA molecule targeting a sequence in intron 4, which is common to both the mutant allele and the other allele,
   [0358] thereby editing the HSPC cells to knockout expression of mutant ELANE allele; and
[0359] introducing the edited HSPC to the candidate patient.

[0360] In embodiments of the present invention, CD34+ cells may be isolated from bone marrow or peripheral blood mononucleated cells (PBMCs) following patient apheresis. Bone marrow or PBMCs may be collected from the patient by apheresis following HSPC mobilization. In embodiments of the invention the apheresis product may be washed to remove platelets and a CD34+ cell population may be enriched via purification using, e.g. a CliniMACS system (Miltenyi Biotec). In embodiments of the present invention, the selected cells may be prestimulated ex vivo, e.g. with a mixture of recombinant human cytokines. In embodiments of the present invention, the cells may undergo electroporation. In embodiments of the present invention, prior to electroporation, stimulated cells (e.g. CD34+ cells), the CRISPR nuclease mRNA and gRNA may be preincubated under defined conditions. In embodiments of the present invention, the cells are electroporated ex vivo with the CRISPR nuclease mRNA/gRNA mixture or with a preassembled RNPs (Ribonuclease protein of the CRISPR nuclease protein and gRNA), followed by cell washing. In embodiments of the present invention, the cells are suspended into a final formulation. In embodiments of the present invention, the cells may be resuspended. In embodiments of the present invention, the resuspended cells may be filled into bags for infusion. In embodiments of the present invention, the bags may be frozen using a freeze down step in a controlled rate freezer and/or stored in the vapor phase of liquid nitrogen. In embodiments of the present invention, the product may be administered by intravenous (IV) administration to a patient.

### Dominant Genetic Disorders

[0361] One of skill in the art will appreciate that all subjects with any type of heterozygote genetic disorder (e.g., dominant genetic disorder) may be subjected to the methods described herein. In one embodiment, the present invention may be used to target a gene involved in, associated with, or causative of dominant genetic disorders such as, for example, SCN or CyN. In some embodiments, the dominant genetic disorder is SCN or CyN. In some embodiments, the target gene is the ELANE gene (Entrez Gene, gene ID No: 335).

### CRISPR Nucleases and PAM Recognition

[0362] In some embodiments, the sequence specific nuclease is selected from CRISPR nucleases, or a functional variant thereof. In some embodiments, the sequence specific nuclease is an RNA guided DNA nuclease. In such embodiments, the RNA sequence which guides the RNA guided DNA nuclease (e.g., Cpf1) binds to and/or directs the RNA guided DNA nuclease to the sequence comprising at least one nucleotide which differs between a mutant allele and its counterpart functional allele (e.g., SNP). In some embodiments, the CRISPR complex does not further comprise a tracrRNA. In a non-limiting example, in which the RNA guided DNA nuclease is a CRISPR protein, the at least one nucleotide which differs between the dominant mutant allele and the functional allele may be within the PAM site and/or proximal to the PAM site within the region that the RNA molecule is designed to hybridize to. A skilled artisan will appreciate that RNA molecules can be engineered to bind to a target of choice in a genome by commonly known methods in the art.

[0363] In embodiments of the present invention, a type II CRISPR system utilizes a mature crRNA:tracrRNA complex directs a CRISPR nuclease, e.g. Cas9, to the target DNA via Watson-Crick base-pairing between the crRNA and the protospacer on the target DNA next to the protospacer adjacent motif (PAM), an additional requirement for target recognition. The CRISPR nuclease then mediates cleavage of target DNA to create a double-stranded break within the protospacer. A skilled artisan will appreciate that each of the engineered RNA molecule of the present invention is further designed such as to associate with a target genomic DNA sequence of interest next to a protospacer adjacent motif (PAM), e.g., a PAM matching the sequence relevant for the type of CRISPR nuclease utilized, such as for a non-limiting example, NGG or NAG, wherein “N” is any nucleobase, for Streptococcus pyogenes Cas9 WT (SpCAS9); NNGRRT for Staphylococcus aureus (SaCas9); NNNVRYM for Jejuni Cas9 WT; NGAN or NGNG for SpCas9-VQR variant; NGCG for SpCas9-VRER variant; NGAG for SpCas9-EQR variant; NNNNGATT for Neisseria meningitidis (NmCas9); or TTTV for Cpf1. RNA molecules of the present invention are each designed to form complexes in conjunction with one or more different CRISPR nucleases and designed to target polynucleotide sequences of interest utilizing one or more different PAM sequences respective to the CRISPR nuclease utilized.

[0364] In some embodiments, an RNA-guided DNA nuclease e.g., a CRISPR nuclease, may be used to cause a DNA break at a desired location in the genome of a cell. The most commonly used RNA-guided DNA nucleases are derived from CRISPR systems, however, other RNA-guided DNA nucleases are also contemplated for use in the genome editing compositions and methods described herein. For instance, see U.S. Patent Publication No. 2015-0211023, incorporated herein by reference.

[0365] CRISPR systems that may be used in the practice of the invention vary greatly. CRISPR systems can be a type I, a type II, type III, or type V system. Non-limiting examples of suitable CRISPR proteins include Cas3, Cas4, Cas5, Cas5e (or CasD), Cas6, Cas6e, Cas6f, Cas7, Cas8a1, Cas8a2, Cas8b, Cas8c, Cas9, Cas10, Cas12a, Cas12b, Cas12c, Cas12d, Cas12d, Casl Od, CasF, CasG, CasH, Csy1, Csy2, Csy3, Cse1 (or CasA), Cse2 (or CasB), Cse3 (or CasE), Cse4 (or CasC), Csc1, Csc2, Csa5, Csn2, Csm2, Csm3, Csm4, Csm5, Csm6, Cmr1, Cmr3, Cmr4, Cmr5, Cmr6, Csb1, Csb2, Csb3, Csx17, Csx14, Csx10, Csx16, CsaX, Csx3, Cszl, Csx15, Csf1, Csf2, Csf3, Csf4, and Cul966. (See, e.g., Koonin 2017).

[0366] In some embodiments, the RNA-guided DNA nuclease is a CRISPR nuclease derived from a type II CRISPR system (e.g., Cas9). The CRISPR nuclease may be derived from Streptococcus pyogenes, Streptococcus thermophilus, Streptococcus sp., Staphylococcus aureus, Neisseria meningitidis, Treponema denticola, Nocardiopsis dassonvillei, Streptomyces pristinaespiralis, Streptomyces viridochromogenes, Streptomyces viridochromogenes, Streptosporangium roseum, Streptosporangium roseum, Alicyclobacillus acidocaldarius, Bacillus pseudomycoides, Bacillus selenitireducens, Exiguobacterium sibiricum, Lactobacillus delbrueckii, Lactobacillus salivarius, Microscilla marina, Burkholderiales bacterium, Polaromonas naphthalenivorans, Polaromonas sp., Crocosphaera watsonii, Cyanothece sp., Microcystis aeruginosa, Synechococcus sp., Acetohalobium arabaticum, Ammonifex degensii, Caldicelulosiruptor becscii, Candidatus Desulforudis, Clostridium botulinum, Clostridium difficile, Finegoldia magna, Natranaerobius thermophilus, Pelotomaculum thermopropionicum, Acidithiobacillus caldus, Acidithiobacillus ferrooxidans, Allochromatium vinosum, Marinobacter sp., Nitrosococcus halophilus, Nitrosococcus watsoni, Pseudoalteromonas haloplanktis, Ktedonobacter racemifer, Methanohalobium evestigatum, Anabaena variabilis, Nodularia spumigena, Nostoc sp., Arthrospira maxima, Arthrospira platensis, Arthrospira sp., Lyngbya sp., Microcoleus chthonoplastes, Oscillatoria sp., Petrotoga mobilis, Thermosipho africanus, Acaryochloris marina, Francisella cf. novicida Fx1, Alicyclobacillus acidoterrestris, Oleiphilus sp., Bacterium CG09_39_24, Deltaproteobacteria bacterium, or any species which encodes a CRISPR nuclease with a known PAM sequence. CRISPR nucleases encoded by uncultured bacteria may also be used in the context of the invention. (See Burstein et al. Nature, 2017). Variants of CRIPSR proteins having known PAM sequences e.g., SpCas9 D1135E variant, SpCas9 VQR variant, SpCas9 EQR variant, or SpCas9 VRER variant may also be used in the context of the invention.

[0367] In embodiments of the present invention, the CRISPR nuclease has cleavage activity when used with an RNA molecule comprising a guide sequence portion having 21-30, or 21-22, nucleotides and may be derived from any of the species recited above. A specific example of a CRISPR nuclease which has cleavage activity when used with an RNA molecule comprising a guide sequence portion having 21 nucleotides is described in Mojica, F. J., et al. (1993). A specific example of a CRISPR nuclease which has cleavage activity when used with an RNA molecule comprising a guide sequence portion having 22 nucleotides is described in Kim, E. et al. (2017). Mojica, F. J., et al. (1993) and Kim, E. et al. (2017) in their entirety and/or for the specific description CRISPR nucleases, are incorporated herein by reference. In such embodiments, the CRISPR nuclease may be engineered and/or non-naturally occurring.

[0368] Thus, an RNA guided DNA nuclease of a CRISPR system, such as a Cas9 protein or modified Cas9 or homolog or ortholog of Cas9, or other RNA guided DNA nucleases belonging to other types of CRISPR systems, such as Cpf1 and its homologs and orthologs, may be used in the compositions of the present invention.

[0369] In certain embodiments, the CRIPSR nuclease may be a “functional derivative” of a naturally occurring Cas protein. A “functional derivative” of a native sequence polypeptide is a compound having a qualitative biological property in common with a native sequence polypeptide. “Functional derivatives” include, but are not limited to, fragments of a native sequence and derivatives of a native sequence polypeptide and its fragments, provided that they have a biological activity in common with a corresponding native sequence polypeptide. A biological activity contemplated herein is the ability of the functional derivative to hydrolyze a DNA substrate into fragments. The term “derivative” encompasses both amino acid sequence variants of polypeptide, covalent modifications, and fusions thereof. Suitable derivatives of a Cas polypeptide or a fragment thereof include but are not limited to mutants, fusions, covalent modifications of Cas protein or a fragment thereof. Cas protein, which includes Cas protein or a fragment thereof, as well as derivatives of Cas protein or a fragment thereof, may be obtainable from a cell or synthesized chemically or by a combination of these two procedures. The cell may be a cell that naturally produces Cas protein, or a cell that naturally produces Cas protein and is genetically engineered to produce the endogenous Cas protein at a higher expression level or to produce a Cas protein from an exogenously introduced nucleic acid, which nucleic acid encodes a Cas that is same or different from the endogenous Cas. In some cases, the cell does not naturally produce Cas protein and is genetically engineered to produce a Cas protein.

[0370] In some embodiments, the CRISPR nuclease is Cpf1. Cpf1 is a single RNA-guided endonuclease which utilizes a T-rich protospacer-adjacent motif. Cpf1 cleaves DNA via a staggered DNA double-stranded break. Two Cpf1 enzymes from Acidaminococcus and Lachnospiraceae have been shown to carry out efficient genome-editing activity in human cells. (See Zetsche et al. (2015) Cell.).

[0371] Thus, an RNA guided DNA nuclease of a Type II CRISPR System, such as a Cas9 protein or modified Cas9 or homologs, orthologues, or variants of Cas9, or other RNA guided DNA nucleases belonging to other types of CRISPR systems, such as Cpf1 and its homologs, orthologues, or variants, may be used in the present invention.

[0372] In some embodiments, the guide molecule comprises one or more chemical modifications which imparts a new or improved property (e.g., improved stability from degradation, improved hybridization energetics, or improved binding properties with an RNA guided DNA nuclease). Suitable chemical modifications include, but are not limited to one or more of: modified bases, modified sugar moieties, or modified inter-nucleoside linkages. Non-limiting examples of suitable chemical modifications include: 4-acetylcytidine, 5-(carboxyhydroxymethyl)uridine, 2′-O-methy cytidine, 5-carboxymethylaminomethyl-2-thiouridine, 5-carboxymethylaminomethyluridine, dihydrouridine, 2′-O-methylpseudouridine, “beta, D-galactosylqueuosine”, 2′-O-methylguanosine, inosine, N6-isopentenyladenosine, 1-methyladenosine, 1-methylpseudouridine, 1-methylguanosine, 1-methylinosine, “2,2-dimethylguanosine”, 2-methyladenosine, 2-methylguanosine, 3-methylcytidine, 5-methylcytidine, N6-methyladenosine, 7-methylguanosine, 5-methylaminomethyluridine, 5-methoxyaminomethyl-2-thiouridine, “beta, D-mannosylqueuosine”, 5-methoxycarbonylmethyl-2-thiouridine, 5-methoxycarbonylmethyluridine, 5-methoxyuridine, 2-methylthio-N6-isopentenyladenosine, N-((9-beta-D-ribofuranosyl-2-methylthiopurine-6-yl)carbamoyl)threonine, N-((9-beta-D-ribofuranosylpurine-6-yl)N-methylcarbamoyl)threonine, uridine-5-oxyacetic acid-methylester, uridine-5-oxyacetic acid, wybutoxosine, queuosine 2-thiocytidine, methyl-2-thiouridine, 2-thiouridine, 4-thiouridine, 5-methyluridine, N-((9-beta-D-ribofuranosylpurine-6-yl)-carbamoyl)threonine, 2′-O-methyl-5-methyluridine, 2′-O-methyluridine, wybutosine, “3-(3-amino-3-carboxy-propyl)uridine, (acp3)u”, 2′-O-methyl (M), 3′-phosphorothioate (MS), 3′-thioPACE (MSP), pseudouridine, or 1-methyl pseudo-uridine. Each possibility represents a separate embodiment of the present invention.

[0373] Further non-limiting examples of suitable chemical modifications include: m¹A (1-methyladenosine); m²A (2-methyladenosine); Am (2′-O-methyladenosine); ms² m⁶A (2-methylthio-N⁶-methyladenosine); i⁶A (N⁶-isopentenyladenosine); ms²i6A (2-methylthio-N⁶isopentenyladeno sine); io⁶A (N⁶-(cis-hydroxyisopentenyl)adenosine); ms²io⁶A (2-methylthio-N⁶-(cis-hydroxyisopentenyl) adenosine); g⁶A (N⁶-glycinylcarbamoyladenosine); t⁶A (N⁶-threonylcarbamoyladenosine); ms²t⁶A (2-methylthio-N⁶-threonyl carbamoyladenosine); m⁶t⁶A (N⁶-methyl-N⁶-threonylcarbamoyladenosine); hn⁶A (N⁶-hydroxynorvalylcarbamoyladenosine); ms²hn⁶A (2-methylthio-N⁶-hydroxynorvalyl carbamoyladenosine); Ar(p) (2′-O-ribosyladenosine (phosphate)); I (inosine); m¹I (1-methylinosine); m¹Im (1,2′-O-dimethylinosine); m³C (3-methylcytidine); Cm (2′-O-methylcytidine); s²C (2-thiocytidine); ac⁴C (N⁴-acetylcytidine); f⁵C (5-formylcytidine); m⁵Cm (5,2′-O-dimethylcytidine); ac⁴Cm (N⁴-acetyl-2′-O-methylcytidine); k²C (lysidine); m¹G (1-methylguanosine); m²G (N²-methylguanosine); m⁷G (7-methylguanosine); Gm (2′-O-methylguanosine); m² 2 G (N²,N²-dimethylguanosine); m²Gm (N^{2,2}′-O-dimethylguanosine); m²₂Gm (N²,N², 2′-O-trimethylguanosine); Gr(p) (2′-O-ribosylguanosine (phosphate)); yW (wybutosine); o₂yW (peroxywybutosine); OHyW (hydroxywybutosine); OHyW* (undermodified hydroxywybutosine); imG (wyosine); mimG (methylwyosine); Q (queuosine); oQ (epoxyqueuosine); galQ (galactosyl-queuosine); manQ (mannosyl-queuosine); preQ₀ (7-cyano-7-deazaguanosine); preQ₁ (7-aminomethyl-7-deazaguanosine); (archaeosine); D (dihydrouridine); m⁵Um (5,2′-O-dimethyluridine); s⁴U (4-thiouridine); m⁵s²U (5-methyl-2-thiouridine); s²Um (2-thio-2′-O-methyluridine); acp³U (3-(3-amino-3-carboxypropyl)uridine); ho⁵U (5-hydroxyuridine); mo⁵U (5-methoxyuridine); cmo⁵U (uridine 5-oxyacetic acid); mcmo⁵U (uridine 5-oxyacetic acid methyl ester); chm⁵U (5-(carboxyhydroxymethyl)uridine)); mchm⁵U (5-(carboxyhydroxymethyl)uridine methyl ester); mcm⁵U (5-methoxycarbonylmethyluridine); mcm⁵Um (5-methoxycarbonylmethyl-2′-O-methyluridine); mcm⁵s²U (5-methoxycarbonylmethyl-2-thiouridine); nm⁵S²U (5-aminomethyl-2-thiouridine); mnm⁵U (5-methylaminomethyluridine); mnm⁵s²U (5-methylaminomethyl-2-thiouridine); mnm⁵se²U (5-methylaminomethyl-2-selenouridine); ncm⁵U (5-carbamoylmethyluridine); ncm⁵Um (5-carbamoylmethyl-2′-O-methyluridine); cmnm⁵U (5-carboxymethylaminomethyluridine); cmnm⁵Um (5-carboxymethylaminomethyl-2′-O-methyluridine); cmmm⁵s²U (5-carboxymethylaminomethyl-2-thiouridine); dimethyladenosine); Im (2′-O-methylinosine); m⁴C (N⁴-methylcytidine); m⁴Cm (N⁴,2′-O-dimethylcytidine); hm⁵C (5-hydroxymethylcytidine); m³U (3-methyluridine); cm⁵U (5-carboxymethyluridine); m⁶Am (N⁶,2′-O-dimethyladenosine); m⁶₂Am (N⁶,N⁶,O-2′-trimethyladenosine); m^{2,7}G (N²,7-dimethylguanosine); m2,2,7G (N²,N²,7-trimethylguanosine); m³Um (3,2′-O-dimethyluridine); m⁵D (5-methyldihydrouridine); f⁵Cm (5-formyl-2′-O-methylcytidine); m¹Gm (1,2′-O-dimethylguanosine); m¹Am (1,2′-O-dimethyladenosine); τm⁵U (5-taurinomethyluridine); τm⁵s²U (5-taurinomethyl-2-thiouridine)); imG-14 (4-demethylwyosine); imG2 (isowyosine); or ac⁶A (N⁶-acetyladenosine). Each possibility represents a separate embodiment of the present invention. (See e.g. U.S. Pat. No. 9,750,824).

[0374] In embodiments of the present invention, the CRISPR nuclease has greater cleavage activity when used with an RNA molecule comprising a guide sequence portion having 21-23 nucleotides, compared to its cleavage activity when used with an RNA molecule comprising a guide sequence portion having 20 or fewer nucleotides, and/or 24 or more nucleotides. In embodiments of the present invention, the CRISPR nuclease has greater cleavage activity when used with an RNA molecule comprising a guide sequence portion having 21-22 nucleotides, compared to its cleavage activity when used with an RNA molecule comprising a guide sequence portion having 20 or fewer nucleotides, and/or 23 or more nucleotides. In an embodiment, the CRISPR nuclease has its greatest cleavage activity when used with an RNA molecule comprising a guide sequence portion having 22 nucleotides.

[0375] In an embodiment, such a CRISPR nuclease has at least 95% identity to the amino acid sequence as set forth in SEQ ID NO: 3789 or the sequence encoding the CRISPR nuclease has at least a 95% sequence identity to SEQ ID NO: 3790 or SEQ ID NO: 3791.

Guide Sequences which Specifically Target a Mutant Allele

[0376] A given gene may contain thousands of SNPs. Utilizing a 24 base pair target window for targeting each SNP in a gene would require hundreds of thousands of guide sequences. Any given guide sequence when utilized to target a SNP may result in degradation of the guide sequence, limited activity, no activity, or off-target effects. Accordingly, suitable guide sequences are necessary for targeting a given gene. By the present invention, a novel set of guide sequences have been identified for knocking out expression of a mutated protein, inactivating a mutant ELANE gene allele, and treating SCN or CyN.

[0377] The present disclosure provides guide sequences capable of specifically targeting a mutant allele for inactivation while leaving the functional allele unmodified. The guide sequences of the present invention are designed to, and are most likely to, specifically differentiate between a mutant allele and a functional allele. Of all possible guide sequences which target a mutant allele desired to be inactivated, the specific guide sequences disclosed herein are specifically effective to function with the disclosed embodiments.

[0378] Briefly, the guide sequences may have properties as follows: (1) target a heterozygous SNP/insertion/deletion/indel with a high prevalence in the general population, in a specific ethnic population or in a patient population is above 1% and the SNP/insertion/deletion/indel heterozygosity rate in the same population is above 1%; (2) target a location of a SNP/insertion/deletion/indel proximal to a portion of the gene e.g., within 5k bases of any portion of the gene, for example, a promoter, a UTR, an exon or an intron; and (3) target a mutant allele using an RNA molecule which targets a founder or common pathogenic mutations for the disease/gene. In some embodiments, the prevalence of the SNP/insertion/deletion/indel in the general population, in a specific ethnic population or in a patient population is above 1%, 2%, 3%, 4%, 5%, 6%, 7%, 8%, 9%, 10%, 11%, 12%, 13%, 14%, or 15% and the SNP/insertion/deletion/indel heterozygosity rate in the same population is above 1%, 2%, 3%, 4%, 5%, 6%, 7%, 8%, 9%, 10%, 11%, 12%, 13%, 14%, or 15%. Each possibility represents a separate embodiment and may be combined at will.

[0379] For each gene, according to SNP/insertion/deletion/indel any one of the following strategies may be used to deactivate the mutant allele: (1) Knockout strategy using one RNA molecule—one RNA molecule is utilized to direct a CRISPR nuclease to a mutant allele and create a double-strand break (DSB) leading to formation of a frameshift mutation in an exon or in a splice site region of the mutant allele; (2) Knockout strategy using two RNA molecules—a first RNA molecule targets a region in the promoter or an upstream region of a mutant allele and another RNA molecule targets downstream of the first RNA molecule in a promoter, exon, or intron of the mutant allele; (3) Exon(s) skipping strategy—one RNA molecule may be used to target a CRISPR nuclease to a splice site region, either at the 5′end of an intron (donor sequence) or the 3′ end of an intron (acceptor sequence), in order to destroy the splice site. Alternatively, two RNA molecules may be utilized such that a first RNA molecule targets an upstream region of an exon and a second RNA molecule targets a region downstream of the first RNA molecule, thereby excising the exon(s). Based on the locations of identified SNPs/insertions/deletions/indels for each mutant allele, any one of, or a combination of, the above-mentioned methods to deactivate the mutant allele may be utilized.

[0380] When two RNA molecules are used, guide sequences may target two SNPs such that the first SNP is upstream of exon 1 e.g., within the 5′ untranslated region, or within the promoter or within the first 2 kilobases 5′ of the transcription start site, and the second SNP is downstream of the first SNP e.g., within the first 2 kilobases 5′ of the transcription start site, or within intron 1, 2 or 3, or within exon 1, exon 2, or exon 3.

[0381] Guide sequences of the present invention may target a SNP in the upstream portion of the targeted gene, preferably upstream of the last exon of the targeted gene. Guide sequences may target a SNP upstream to exon 1, for example within the 5′ untranslated region, or within the promoter or within the first 4-5 kilobases 5′ of the transcription start site.

[0382] Guide sequences of the present invention may also target a SNP within close proximity (e.g., within 50 basepairs, more preferably with 20 basepairs) to a known protospacer adjacent motif (PAM) site.

[0383] Guide sequences of the present invention also may target: (1) a heterozygous SNP for the targeted gene; (2) a heterozygous SNPs upstream and downstream of the gene; (3) a SNPs with a prevalence of the SNP/insertion/deletion/indel in the general population, in a specific ethnic population, or in a patient population above 1%; (4) have a guanine-cytosine content of greater than 30% and less than 85%; (5) have no repeat of 4 or more thymine/uracil or 8 or more guanine, cytosine, or adenine; (6) having no off-target identified by off-target analysis; and (7) preferably target Exons over Introns or be upstream of a SNP rather than downstream of a SNP.

[0384] In embodiments of the present invention, the SNP may be upstream or downstream of the gene. In embodiments of the present invention, the SNP is within 3000 base pairs upstream or downstream of the gene.

[0385] The at least one nucleotide which differs between the mutant allele and the functional allele, may be upstream, downstream or within the sequence of the disease-causing mutation of the gene of interest. The at least one nucleotide which differs between the mutant allele and the functional allele, may be within an exon or within an intron of the gene of interest. In some embodiments, the at least one nucleotide which differs between the mutant allele and the functional allele is within an exon of the gene of interest. In some embodiments, the at least one nucleotide which differs between the mutant allele and the functional allele is within an intron or an exon of the gene of interest, in close proximity to a splice site between the intron and the exon e.g., 1, 2, 3, 4, 5, 6, 7, 8, 9, 10, 11, 12, 13, 14, 15, 16, 17, 18, 19, or 20 nucleotides upstream or downstream to the splice site.

[0386] In some embodiments, the at least one nucleotide is a single nucleotide polymorphisms (SNPs). In some embodiments, each of the nucleotide variants of the SNP may be expressed in the mutant allele. In some embodiments, the SNP may be a founder or common pathogenic mutation.

[0387] Guide sequences may target a SNP which has both (1) a high prevalence in the general population e.g., above 1% in the population; and (2) a high heterozygosity rate in the population, e.g., above 1%. Guide sequences may target a SNP that is globally distributed. A SNP may be a founder or common pathogenic mutation. In some embodiments, the prevalence in the general population is above 1%, 2%, 3%, 4%, 5%, 6%, 7%, 8%, 9%, 10%, 11%, 12%, 13%, 14%, or 15%. Each possibility represents a separate embodiment. In some embodiments, the heterozygosity rate in the population is above 1%, 2%, 3%, 4%, 5%, 6%, 7%, 8%, 9%, 10%, 11%, 12%, 13%, 14%, or 15%. Each possibility represents a separate embodiment.

[0388] In some embodiments, the at least one nucleotide which differs between the mutant allele and the functional allele is linked to/co-exists with the disease-causing mutation in high prevalence in a population. In such embodiments, “high prevalence” refers to at least 92%, 93%, 94%, 95%, 96%, 97%, 98%, 99%, or 100%. Each possibility represents a separate embodiment of the present invention. In one embodiment, the at least one nucleotide which differs between the mutant allele and the functional allele, is a disease-associated mutation. In some embodiments, the SNP is highly prevalent in the population. In such embodiments, “highly prevalent” refers to at least 10%, 11%, 12%, 13%, 14%, 15%, 20%, 30%, 40%, 50%, 60%, or 70% of a population. Each possibility represents a separate embodiment of the present invention.

[0389] Guide sequences of the present invention may satisfy any one of the above criteria and are most likely to differentiate between a mutant allele from its corresponding functional allele.

[0390] FIG. 5 discloses the heterogenicity of selections of ELANE SNPs in the human population.

[0391] Embodiments of the present invention may include excising the promoter region from an upstream SNP position until intron 4. In an embodiment, a first guide sequence targets a specific sequence of a heterozygous SNP position in an upstream region of the mutant allele (strategy 1a—rs10414837, strategy 1b—rs3761005) and a second guide sequence targets a sequence in intron 4 which is common to two alleles of the gene. (FIG. 1).

[0392] Embodiments of the present invention may include excising from intron 4 to regions downstream to the 3′ UTR. In an embodiment, a first guide sequence targets a specific sequence of a heterozygous SNP position in an upstream region of the mutant allele (strategy 2-rs1683564) and a second guide sequence targets a sequence in intron 4 which is common to two alleles of the gene.

[0393] Embodiments of the present invention excising from intron 4 to regions downstream to the 3′ UTR (FIG. 4). The strategy is designed such as to specifically knock-out the disease-causing allele (‘mutant allele’), while leaving the healthy allele intact. Allele specific editing is achieved by using guides that target discriminating (heterozygous) SNP positions with relatively high heterozygosity frequency in the population.

### Delivery to Cells

[0394] It is understood that in the methods embodied, the RNA molecules and compositions described herein may be delivered to a target cell or subject by any suitable means. The following embodiments provide non-limiting examples of methods of delivery of the RNA molecules and composition of the present invention.

[0395] In some embodiments, RNA molecule compositions of the present invention may be targeted to any cell which contains and/or expresses a dominant negative allele, including any mammalian or plant cell. For example, in one embodiment the RNA molecule specifically targets a mutant ELANE allele and the target cell is a hepatocyte cell.

[0396] Any suitable viral vector system may be used to deliver nucleic acid compositions e.g., the RNA molecule compositions of the subject invention. Conventional viral and non-viral based gene transfer methods can be used to introduce nucleic acids and target tissues. In certain embodiments, nucleic acids are administered for in vivo or ex vivo gene therapy uses. Non-viral vector delivery systems include naked nucleic acid, and nucleic acid complexed with a delivery vehicle such as a liposome or poloxamer. For a review of gene therapy procedures, see Anderson (1992) Science 256:808-813; Nabel & Felgner (1993) TIBTECH 11:211-217; Mitani & Caskey (1993) TIBTECH 11:162-166; Dillon (1993) TIBTECH 11:167-175; Miller (1992) Nature 357:455-460; Van Brunt (1988) Biotechnology 6(10):1149-1154; Vigne (1995) Restorative Neurology and Neuroscience 8:35-36; Kremer & Perricaudet (1995) British Medical Bulletin 51(1):31-44; Haddada et al. (1995) in Current Topics in Microbiology and Immunology Doerfler and Bohm (eds.); and Yu et al. (1994) Gene Therapy 1:13-26.

[0397] Methods of non-viral delivery of nucleic acids and/or proteins include electroporation, lipofection, microinjection, biolistics, particle gun acceleration, virosomes, liposomes, immunoliposomes, lipid nanoparticles (LNPs), polycation or lipid:nucleic acid conjugates, artificial virions, and agent-enhanced uptake of nucleic acids or can be delivered to plant cells by bacteria or viruses (e.g., Agrobacterium, Rhizobium sp. NGR234, Sinorhizoboiummeliloti, Mesorhizobium loti, tobacco mosaic virus, potato virus X, cauliflower mosaic virus and cassava vein mosaic virus). (See, e.g., Chung et al. (2006) Trends Plant Sci. 11(1):1-4). Sonoporation using, e.g., the Sonitron 2000 system (Rich-Mar), can also be used for delivery of nucleic acids. Cationic-lipid mediated delivery of proteins and/or nucleic acids is also contemplated as an in vivo or in vitro delivery method. (See Zuris et al. (2015) Nat. Biotechnol. 33(1):73-80; see also Coelho et al. (2013) N. Engl. J. Med. 369, 819-829; Judge et al. (2006) Mol. Ther. 13, 494-505; and Basha et al. (2011) Mol. Ther. 19, 2186-2200).

[0398] Additional exemplary nucleic acid delivery systems include those provided by Amaxa® Biosystems (Cologne, Germany), Maxcyte, Inc. (Rockville, Md.), BTX Molecular Delivery Systems (Holliston, Mass.) and Copernicus Therapeutics Inc., (see, e.g., U.S. Pat. No. 6,008,336). Lipofection is described in e.g., U.S. Pat. Nos. 5,049,386, 4,946,787; and 4,897,355, and lipofection reagents are sold commercially (e.g., Transfectam™, Lipofectin™ and Lipofectamine™ RNAiMAX). Cationic and neutral lipids that are suitable for efficient receptor-recognition lipofection of polynucleotides include those of Felgner, WO 91/17424, WO 91/16024. Delivery can be to cells (ex vivo administration) or target tissues (in vivo administration).

[0399] The preparation of lipid:nucleic acid complexes, including targeted liposomes such as immunolipid complexes, is well known to one of skill in the art (See, e.g., Crystal (1995) Science 270:404-410; Blaese et al. (1995) Cancer Gene Ther. 2:291-297; Behr et al. (1994) Bioconjugate Chem. 5:382-389; Remy et al. (1994) Bioconjugate Chem. 5:647-654; Gao et al. (1995) Gene Therapy 2:710-722; Ahmad et al. (1992) Cancer Res. 52:4817-4820; U.S. Pat. Nos. 4,186,183, 4,217,344, 4,235,871, 4,261,975, 4,485,054, 4,501,728, 4,774,085, 4,837,028, and 4,946,787).

[0400] Additional methods of delivery include the use of packaging the nucleic acids to be delivered into EnGeneIC delivery vehicles (EDVs). These EDVs are specifically delivered to target tissues using bispecific antibodies where one arm of the antibody has specificity for the target tissue and the other has specificity for the EDV. The antibody brings the EDVs to the target cell surface and then the EDV is brought into the cell by endocytosis. Once in the cell, the contents are released (See MacDiarmid et al (2009) Nature Biotechnology 27(7):643).

[0401] The use of RNA or DNA viral based systems for viral mediated delivery of nucleic acids take advantage of highly evolved processes for targeting a virus to specific cells in the body and trafficking the viral payload to the nucleus. Viral vectors can be administered directly to patients (in vivo) or they can be used to treat cells in vitro and the modified cells are administered to patients (ex vivo). Conventional viral based systems for the delivery of nucleic acids include, but are not limited to, retroviral, lentivirus, adenoviral, adeno-associated, vaccinia and herpes simplex virus vectors for gene transfer.

[0402] The tropism of a retrovirus can be altered by incorporating foreign envelope proteins, expanding the potential target population of target cells. Lentiviral vectors are retroviral vectors that are able to transduce or infect non-dividing cells and typically produce high viral titers. Selection of a retroviral gene transfer system depends on the target tissue. Retroviral vectors are comprised of cis-acting long terminal repeats with packaging capacity for up to 6-10 kb of foreign sequence. The minimum cis-acting LTRs are sufficient for replication and packaging of the vectors, which are then used to integrate the therapeutic gene into the target cell to provide permanent transgene expression. Widely used retroviral vectors include those based upon murine leukemia virus (MuLV), gibbon ape leukemia virus (GaLV), Simian Immunodeficiency virus (SIV), human immunodeficiency virus (HIV), and combinations thereof (See, e.g., Buchschacher et al. (1992) J. Virol. 66:2731-2739; Johann et al. (1992) J. Virol. 66:1635-1640; Sommerfelt et al. (1990) Virol. 176:58-59; Wilson et al. (1989) J. Virol. 63:2374-2378; Miller et al. (1991) J. Virol. 65:2220-2224; PCT/US94/05700).

[0403] At least six viral vector approaches are currently available for gene transfer in clinical trials, which utilize approaches that involve complementation of defective vectors by genes inserted into helper cell lines to generate the transducing agent.

[0404] pLASN and MFG-S are examples of retroviral vectors that have been used in clinical trials (Dunbar et al. (1995) Blood 85:3048-305; Kohn et al. (1995) Nat. Med. 1:1017-102; Malech et al. (1997) PNAS 94:22 12133-12138). PA317/pLASN was the first therapeutic vector used in a gene therapy trial. (Blaese et al. (1995). Transduction efficiencies of 50% or greater have been observed for MFG-S packaged vectors. (Ellem et al. (1997) Immunol Immunother. 44(1):10-20; Dranoff et al. (1997) Hum. Gene Ther. 1:111-2).

[0405] Packaging cells are used to form virus particles that are capable of infecting a host cell. Such cells include 293 cells, which package adenovirus, AAV, and Psi-2 cells or PA317 cells, which package retrovirus. Viral vectors used in gene therapy are usually generated by a producer cell line that packages a nucleic acid vector into a viral particle. The vectors typically contain the minimal viral sequences required for packaging and subsequent integration into a host (if applicable), other viral sequences being replaced by an expression cassette encoding the protein to be expressed. The missing viral functions are supplied in trans by the packaging cell line. For example, AAV vectors used in gene therapy typically only possess inverted terminal repeat (ITR) sequences from the AAV genome which are required for packaging and integration into the host genome. Viral DNA is packaged in a cell line, which contains a helper plasmid encoding the other AAV genes, namely rep and cap, but lacking ITR sequences. The cell line is also infected with adenovirus as a helper. The helper virus promotes replication of the AAV vector and expression of AAV genes from the helper plasmid. The helper plasmid is not packaged in significant amounts due to a lack of ITR sequences. Contamination with adenovirus can be reduced by, e.g., heat treatment to which adenovirus is more sensitive than AAV. Additionally, AAV can be produced at clinical scale using baculovirus systems (see U.S. Pat. No. 7,479,554).

[0406] In many gene therapy applications, it is desirable that the gene therapy vector be delivered with a high degree of specificity to a particular tissue type. Accordingly, a viral vector can be modified to have specificity for a given cell type by expressing a ligand as a fusion protein with a viral coat protein on the outer surface of the virus. The ligand is chosen to have affinity for a receptor known to be present on the cell type of interest. For example, Han et al. (1995) Proc. Natl. Acad. Sci. USA 92:9747-9751, reported that Moloney murine leukemia virus can be modified to express human heregulin fused to gp70, and the recombinant virus infects certain human breast cancer cells expressing human epidermal growth factor receptor. This principle can be extended to other virus-target cell pairs, in which the target cell expresses a receptor and the virus expresses a fusion protein comprising a ligand for the cell-surface receptor. For example, filamentous phage can be engineered to display antibody fragments (e.g., FAB or Fv) having specific binding affinity for virtually any chosen cellular receptor. Although the above description applies primarily to viral vectors, the same principles can be applied to nonviral vectors. Such vectors can be engineered to contain specific uptake sequences which favor uptake by specific target cells.

[0407] Gene therapy vectors can be delivered in vivo by administration to an individual patient, typically by systemic administration (e.g., intravitreal, intravenous, intraperitoneal, intramuscular, subdermal, or intracranial infusion) or topical application, as described below. Alternatively, vectors can be delivered to cells ex vivo, such as cells explanted from an individual patient (e.g., lymphocytes, bone marrow aspirates, tissue biopsy) or universal donor hematopoietic stem cells, followed by reimplantation of the cells into a patient, usually after selection for cells which have incorporated the vector.

[0408] Ex vivo cell transfection for diagnostics, research, or for gene therapy (e.g., via re-infusion of the transfected cells into the host organism) is well known to those of skill in the art. In a preferred embodiment, cells are isolated from the subject organism, transfected with a nucleic acid composition, and re-infused back into the subject organism (e.g., patient). Various cell types suitable for ex vivo transfection are well known to those of skill in the art (See, e.g., Freshney et al. (1994) Culture of Animal Cells, A Manual of Basic Technique, 3rd ed, and the references cited therein for a discussion of how to isolate and culture cells from patients).

[0409] Suitable cells include, but are not limited to, eukaryotic cells and/or cell lines. Non-limiting examples of such cells or cell lines generated from such cells include COS, CHO (e.g., CHO-S, CHO-K1, CHO-DG44, CHO-DUXB11, CHO-DUKX, CHOK1SV), VERO, MDCK, WI38, V79, B14AF28-G3, BHK, HaK, NSO, SP2/0-Ag14, HeLa, HEK293 (e.g., HEK293-F, HEK293-H, HEK293-T), perC6 cells, any plant cell (differentiated or undifferentiated), as well as insect cells such as Spodopterafugiperda (Sf), or fungal cells such as Saccharomyces, Pichia and Schizosaccharomyces. In certain embodiments, the cell line is a CHO-K1, MDCK or HEK293 cell line. Additionally, primary cells may be isolated and used ex vivo for reintroduction into the subject to be treated following treatment with a guided nuclease system (e.g. CRISPR/Cas). Suitable primary cells include peripheral blood mononuclear cells (PBMC), and other blood cell subsets such as, but not limited to, CD4+ T cells or CD8+ T cells. Suitable cells also include stem cells such as, by way of example, embryonic stem cells, induced pluripotent stem cells, hematopoietic stem cells (CD34+), neuronal stem cells and mesenchymal stem cells.

[0410] In one embodiment, stem cells are used in ex vivo procedures for cell transfection and gene therapy. The advantage to using stem cells is that they can be differentiated into other cell types in vitro, or can be introduced into a mammal (such as the donor of the cells) where they will engraft in the bone marrow. Methods for differentiating CD34+ cells in vitro into clinically important immune cell types using cytokines such a GM-CSF, IFN-gamma, and TNF-alpha are known (as a non-limiting example see, Inaba et al., J. Exp. Med. 176:1693-1702 (1992)).

[0411] Stem cells are isolated for transduction and differentiation using known methods. For example, stem cells are isolated from bone marrow cells by panning the bone marrow cells with antibodies which bind unwanted cells, such as CD4+ and CD8+(T cells), CD45+(panB cells), GR-1 (granulocytes), and Tad (differentiated antigen presenting cells) (as a non-limiting example see Inaba et al. (1992) J. Exp. Med. 176:1693-1702). Stem cells that have been modified may also be used in some embodiments.

[0412] Typically, the cells are administered in a pharmaceutical composition comprising at least one pharmaceutically-acceptable carrier. The phrase “pharmaceutically acceptable” refers to those compounds, materials, compositions, and/or dosage forms which are, within the scope of sound medical judgment, suitable for use in contact with the tissues of human beings and animals without excessive toxicity, irritation, allergic response, or other problem or complication, commensurate with a reasonable benefit/risk ratio. The phrase “pharmaceutically acceptable carrier” as used herein means a pharmaceutically-acceptable material, composition or vehicle, such as a liquid or solid filler, diluent, excipient, or solvent encapsulating material.

[0413] Any one of the RNA molecule compositions described herein is suitable for genome editing in post-mitotic cells or any cell which is not actively dividing, e.g., arrested cells. Examples of post-mitotic cells which may be edited using an RNA molecule composition of the present invention include, but are not limited to, a hepatocyte cell.

[0414] Vectors (e.g., retroviruses, liposomes, etc.) containing therapeutic nucleic acid compositions can also be administered directly to an organism for transduction of cells in vivo. Administration is by any of the routes normally used for introducing a molecule into ultimate contact with blood or tissue cells including, but not limited to, injection, infusion, topical application (e.g., eye drops and cream) and electroporation. Suitable methods of administering such nucleic acids are available and well known to those of skill in the art, and, although more than one route can be used to administer a particular composition, a particular route can often provide a more immediate and more effective reaction than another route. According to some embodiments, the composition is delivered via IV injection.

[0415] Vectors suitable for introduction of transgenes into immune cells (e.g., T-cells) include non-integrating lentivirus vectors. See, e.g., U.S. Patent Publication No. 2009-0117617.

[0416] Pharmaceutically acceptable carriers are determined in part by the particular composition being administered, as well as by the particular method used to administer the composition. Accordingly, there is a wide variety of suitable formulations of pharmaceutical compositions available, as described below (See, e.g., Remington's Pharmaceutical Sciences, 17th ed., 1989).

[0417] In accordance with some embodiments, there is provided an RNA molecule which binds to/associates with and/or directs the RNA guided DNA nuclease to a sequence comprising at least one nucleotide which differs between a mutant allele and a functional allele (e.g., SNP) of a gene of interest (i.e., a sequence of the mutant allele which is not present in the functional allele). The sequence may be within the disease associated mutation. The sequence may be upstream or downstream to the disease associated mutation. Any sequence difference between the mutant allele and the functional allele may be targeted by an RNA molecule of the present invention to inactivate the mutant allele, or otherwise disable its dominant disease-causing effects, while preserving the activity of the functional allele.

[0418] The disclosed compositions and methods may also be used in the manufacture of a medicament for treating dominant genetic disorders in a patient.

### Mechanisms of Action for Several Embodiments Disclosed Herein

[0419] Mutations in ELANE that were demonstrated to lead to SCN or CyN, mediate translation from alternative in frame ORF (open reading frame) that generate truncated N-terminus protein thus causing ER and protein misfolding stress.

[0420] Without being bound by any theory or mechanism, the instant invention may be utilized to apply a CRISPR nuclease to process the mutated pathologic ELANE allele and not the functional ELANE allele, such as to prevent expression of the mutated pathologic allele or to produce a truncated non-pathologic peptide from the mutated pathologic allele, or to repair/correct the mutated pathologic ELANE allele in order to prevent ameliorate or treat SCN or CyN.

[0421] Several alternative editing strategies utilizing SNPs located upstream and downstream to the ORF may be applied. The strategies include exclusion of the whole gene, truncation of the gene to exclude the C-terminus of the gene, and attenuation of the expression of the gene.

[0422] In some embodiments, two guides (e.g., guides disclosed in Table 1) may be utilized to remove the entire gene (i.e., exons 1, 2, 3, 4, and 5) to knockout the mutant protein. In some embodiments, a first guide RNA is utilized to mediate an allele specific DSB by targeting a SNP/WT sequence located upstream to the ORF of the mutated allele of the ELANE gene, and a second guide RNA may be utilized to mediate DSB in a SNP/WT sequence located in exon 5 or downstream to the mutated allele of the ELANE gene, or a sequence located in intron 4, 3′ UTR or downstream to the alleles of the ELANE gene, or a SNP/WT sequence located in intron 4 3′UTR or downstream to the alleles of the ELANE gene.

[0423] There are records of healthy individuals harboring frameshift mutation that result in gain of stop codon located till exon 3. Therefore, a potential strategy may be to truncate the mutated allele such that to include at most exons 1 till 3. In some embodiments, two guides (e.g., guides disclosed in Table 1) may be utilized to truncate the c-terminus of the mutated allele of the ELANE gene. In some embodiments, a first guide RNA may be utilized to mediate an allele specific DSB by targeting a SNP/WT sequence in exon 5 or downstream of the mutated allele, and a second guide RNA may be utilized to mediate DSB in a sequence located in intron 1, 2 or 3 of the ELANE gene, or a SNP/WT sequence. A peptide/protein encoded by the truncated mutated allele may exhibit no pathological effect. Alternatively, a nonsense-mediated mRNA decay may be triggered resulting in knockout of the expression of the mutated allele. Results may be verified by examining mRNA and protein expression.

[0424] In some embodiments, the expression of the mutated allele may be attenuated by excising elements from the proximal promoter and enhancer regions using the SNPs located upstream to the ORF. In a non-limiting example, a significant reduction may be achieved by excising most of the enhancer region by targeting a SNP.

### Examples of RNA Guide Sequences which Specifically Target Mutant Alleles of ELANE Gene

[0425] Although a large number of guide sequences can be designed to target a mutant allele, the nucleotide sequences described in Table 1 identified by SEQ ID NOs: 1-3751 below were specifically selected to effectively implement the methods set forth herein and to effectively discriminate between alleles.

[0426] Table 1 shows guide sequences designed for use as described in the embodiments above to associate with different SNPs within a sequence of a mutant ELANE allele. Each engineered guide molecule is further designed such as to associate with a target genomic DNA sequence of interest that lies next to a protospacer adjacent motif (PAM), e.g., a PAM matching the sequence NGG or NAG, where “N” is any nucleobase. The guide sequences were designed to work in conjunction with one or more different CRISPR nucleases, including, but not limited to, e.g. SpCas9WT (PAM SEQ: NGG), SpCas9.VQR.1 (PAM SEQ: NGAN), SpCas9.VQR.2 (PAM SEQ: NGNG), SpCas9.EQR (PAM SEQ: NGAG), SpCas9.VRER (PAM SEQ: NGCG), SaCas9WT (PAM SEQ: NNGRRT), NmCas9WT (PAM SEQ: NNNNGATT), Cpf1 (PAM SEQ: TTTV), or JeCas9WT (PAM SEQ: NNNVRYM). RNA molecules of the present invention are each designed to form complexes in conjunction with one or more different CRISPR nucleases and designed to target polynucleotide sequences of interest utilizing one or more different PAM sequences respective to the CRISPR nuclease utilized.

TABLE 1
Guide sequences designed to associate with the ELANE gene

| | SEQ ID | SEQ ID | SEQ ID |
|---|---|---|---|
| | NOs: of | NOs: of | NOs: of |
| | 20 base | 21 base | 22 base |
| Target | guides | guides | guides |
| 19:848798_T_C_rs10424470_REF | N/A | 1-48 | 49-98 |
| 19:848798_T_C_rs10424470_SNP | N/A | 3, 11, 16, | 51, 59, 64, |
| | | 22, 29, 41, | 77, 86, 90, |
| | | 45, 48, 99- | 93, 98, 139- |
| | | 138 | 180 |
| 19:849138_T_C_rs4807932_REF | N/A | | 181 |
| 19:849138_T_C_rs4807932_SNP | N/A | 182-185 | 181, 186- |
| | | | 195 |
| 19:849618_C_T_rs10414837_REF | N/A | 196-243 | 244-293 |
| 19:849618_C_T_rs10414837_SNP | N/A | 199, 202, | 244, 248, |
| | | 207, 217, | 251, 256, |
| | | 225, 228, | 258, 267, |
| | | 230, 235, | 275, 278, |
| | | 294-333 | 334-375 |
| 19:849688_CTTTTTTTTTT_C_rs376107533_REF | N/A | 376-382 | 383-391 |
| 19:849935_A_C_rs3761010_REF | N/A | 392-404 | 405-419 |
| 19:849935_A_C_rs3761010_SNP | N/A | | 411 |
| 19:849959_G_A_rs351108_SNP | N/A | | 420-422 |
| 19:850023_T_C_rs3761008_SNP | N/A | 423-424 | 425-428 |
| 19:850199_T_A_rs3826946_REF | N/A | 429-453 | 454-493 |
| 19:850199_T_A_rs3826946_SNP | N/A | 431-432, | 454, 457, |
| | | 434, 436, | 462, 471- |
| | | 440-441, | 472, 483, |
| | | 452, 494- | 489-490, |
| | | 511 | 512-543 |
| 19:850299_G_A_rs10413889_REF | N/A | 544-591 | 592-641 |
| 19:850299_G_A_rs10413889_SNP | N/A | 551, 559, | 599, 616, |
| | | 569-570, | 619, 623- |
| | | 574-575, | 624, 626, |
| | | 577, 579, | 628, 630, |
| | | 642-681 | 682-723 |
| 19:850574_G_A_rs3761007_REF | N/A | 724-771 | 772-821 |
| 19:850574_G_A_rs3761007_SNP | N/A | 726-727, | 774, 781, |
| | | 732-733, | 784, 794, |
| | | 736, 746, | 796, 806, |
| | | 759, 764, | 809, 814, |
| | | 822-861 | 862-903 |
| 19:850733_C_G_rs10409474_REF | N/A | 904-951 | 952-1001 |
| 19:850733_C_G_rs10409474_SNP | N/A | 920-921, | 968-970, |
| | | 925-926, | 975, 983, |
| | | 934, 939, | 987, 989, |
| | | 943, 950, | 1000, 1042- |
| | | 1002-1041 | 1083 |
| 19:850793_T_A_rs3761005_REF | N/A | 1084-1131 | 1132-1181 |
| 19:850793_T_A_rs3761005_SNP | N/A | 1088, 1095, | 1136, 1142, |
| | | 1099, 1101, | 1144, 1148, |
| | | 1107, 1111, | 1156, 1160, |
| | | 1119-1120, | 1164, 1170, |
| | | 1182-1221 | 1222-1263 |
| 19:851401_T_G_rs351107_SNP | N/A | 1264-1311 | 1312-1361 |
| 19:851563_G_A_rs3761001_REF | N/A | 1362-1390 | 1391-1421 |
| 19:852104_C_A_rs740021_REF | N/A | 1422-1426 | 1427-1437 |
| 19:852104_C_A_rs740021_SNP | N/A | 1422-1423, | 1427, 1429, |
| | | 1426 | 1434-1435 |
| 19:852594_AGG_A_rs781452480_REF | N/A | 1438-1454 | 1455-1471 |
| 19:852594_AGG_A_rs781452480_SNP | N/A | 1454 | 1469, 1472 |
| 19:852594_AG_A_rs371057361_REF | N/A | 1438-1454 | 1455-1471 |
| 19:852594_A_G_rs570466264_REF | N/A | 1438-1454 | 1455-1471 |
| 19:852594_A_G_rs570466264_SNP | N/A | 1438-1439, | 1455-1457, |
| | | 1446, 1450, | 1464, 1476- |
| | | 1473-1475 | 1478 |
| 19:852606_T_G_rs1041904080_REF | N/A | 1479-1493 | 1472, 1494- |
| | | | 1509 |
| 19:852606_T_G_rs1041904080_SNP | N/A | 1485-1486, | 1496, 1500, |
| | | 1492-1493, | 1508-1509, |
| | | 1510-1512 | 1513-1517 |
| 19:855162_T_A_rs7250194_SNP | N/A | 1518-1519 | 1520-1521 |
| 19:855966_C_A_rs17216649_REF | N/A | 1522-1567 | 1568-1617 |
| 19:855966_C_A_rs17216649_SNP | N/A | 1534, 1537, | 1581, 1584, |
| | | 1540, 1557- | 1587, 1592, |
| | | 1558, 1561, | 1596, 1607, |
| | | 1565, 1567, | 1615, 1617, |
| | | 1618-1657 | 1658-1699 |
| 19:856416_T_TA_rs199720952_REF | N/A | 1700-1716 | 1717-1733 |
| 19:856416_T_TA_rs199720952_SNP | N/A | 1703 | 1718 |
| 19:856482_C_T_rs6510983_REF | N/A | 1734-1752 | 1753-1775 |
| 19:856482_C_T_s6510983_SNP | N/A | 1734-1735, | 1753, 1757, |
| | | 1738, 1740, | 1759, 1772, |
| | | 1776-1794 | 1795-1815 |
| 19:856530_G_A_rs17223066_REF | N/A | 1816-1818 | 1819-1823 |
| 19:856530_G_A_rs17223066_SNP | N/A | 1816-1817, | 1820-1821, |
| | | 1824-1832 | 1823, 1833- |
| | | | 1842 |
| 19:856783_T_A_rs7255385_REF | N/A | 1843-1847 | 1848-1854 |
| 19:857215_G_A_rs9749274_REF | N/A | 1855-1867 | 1868-1882 |
| 19:857215_G_A_rs9749274_SNP | N/A | 1860, 1862- | 1874-1875, |
| | | 1863, 1865, | 1877, 1880, |
| | | 1883-1887 | 1888-1894 |
| 19:857444_C_T_rs111361200_SNP | N/A | | 1895 |
| 19:857848_CA_C_rs112639467_REF | N/A | 1896-1900 | 1901-1907 |
| 19:857848_C_CA_rs141213775_REF | N/A | 1896-1900 | 1901-1907 |
| 19:858296_C_A_rs28591229_REF | N/A | 1908-1953 | 1954-2001 |
| 19:858296_C_A_rs28591229_SNP | N/A | 1917, 1920, | 1983, 1985, |
| | | 1937, 1939, | 1989-1991, |
| | | 1943-1944, | 1999, 2042- |
| | | 2002-2041 | 2083 |
| 19:858376_C_T_rs10469327_REF | N/A | 2084-2131 | 2132-2181 |
| 19:858376_C_T_rs10469327_SNP | N/A | 2085-2086, | 2132, 2134- |
| | | 2092, 2105, | 2135, 2141, |
| | | 2110, 2113, | 2159, 2162, |
| | | 2118-2119, | 2168, 2179, |
| | | 2182-2221 | 2222-2263 |
| 19:859067_GA_G_rs3834645_REF | N/A | 2264-2307 | 2308-2353 |
| 19:859067_GA_G_rs3834645_SNP | N/A | 2274, 2287, | 2319, 2333, |
| | | 2293, 2300, | 2339, 2351, |
| | | 2354-2392 | 2393-2433 |
| 19:859214_C_A_rs1683564_REF | N/A | 2434-2481 | 2482-2531 |
| 19:859214_C_A_rs1683564_SNP | N/A | 2435-2436, | 2483, 2490, |
| | | 2442, 2444, | 2499, 2504, |
| | | 2451, 2456, | 2513, 2519, |
| | | 2465, 2471, | 2521, 2524, |
| | | 2532-2571 | 2572-2613 |
| 19:859368_G_T_rs71335276_REF | N/A | 2614-2661 | 2662-2711 |
| 19:859368_G_T_rs71335276_SNP | N/A | 2616, 2624, | 2672, 2676, |
| | | 2627, 2633, | 2682, 2685, |
| | | 2636, 2641, | 2687, 2691, |
| | | 2647, 2654, | 2697, 2704, |
| | | 2712-2751 | 2752-2793 |
| 19:859831_T_G_rs8107095_REF | N/A | 2794-2841 | 2842-2891 |
| 19:859831_T_G_rs8107095_SNP | N/A | 2794-2796, | 2842-2843, |
| | | 2801-2802, | 2848, 2850- |
| | | 2804, 2826, | 2851, 2875, |
| | | 2835, 2892- | 2883, 2885, |
| | | 2917 | 2918-2953 |
| 19:855795-855957 | 2954- | 3218-3483 | 3484-3751 |
| (Intron 4) | 3217 | | |

The indicated locations listed in column 1 of the Table 1 are based on gnomAD v3 database and UCSC Genome Browser assembly ID: hg38, Sequencing/Assembly provider ID: Genome Reference Consortium Human GRCh38.p12 (GCA_000001405.27). Assembly date: December 2013 initial release; December 2017 patch release 12.The SNP details are indicated by the listed SNP ID NOs. (“rs numbers”), which are based onthe NCBI 2018 database of Single Nucleotide Polymorphisms (dbSNP)). The indicated DNA mutations are associated with Transcript Consequence NM_001972 as obtained from NCBI RefSeq genes.

[0427] For the foregoing embodiments, each embodiment disclosed herein is contemplated as being applicable to each of the other disclosed embodiment. For example, it is understood that any of the RNA molecules or compositions of the present invention may be utilized in any of the methods of the present invention.

[0428] As used herein, all headings are simply for organization and are not intended to limit the disclosure in any manner. The content of any individual section may be equally applicable to all sections.

[0429] Examples are provided below to facilitate a more complete understanding of the invention. The following examples illustrate the exemplary modes of making and practicing the invention. However, the scope of the invention is not limited to specific embodiments disclosed in these Examples, which are for purposes of illustration only.

[0430] Further. the examples herein below disclose methods utilizing SpCas9 and guide sequences suitable to target the SpCas9 to the disclosed SNP positions. The examples demonstrate the feasibility of the strategies disclosed. A person having ordinary skill in the art would understand that the same guides sequences may be used with different CRISPR nuclease to target the disclosed SNPs to apply each of the specified strategies. Further, different guide sequences that target other CRISPR nucleases to the same SNPs may be used together with the other nucleases to apply each of the specified strategies.

### EXPERIMENTAL DETAILS

### Example 1: Screening Guide Sequences Suitable to Work in Conjunction with SpCas9 and Targeting SNPs and Sequences Complying with the Disclosed Strategies

[0431] HeLa cells were seeded into 96 well-plate (3K/well). 24 hours later, cells were co-transfected with either 65 ng of WT-Cas9 or Dead-Cas9 and 20 ng of a gRNA plasmid, identified as g36 through g66, targeting different regions and SNPs in ELANE using Turbofect reagent (Thermo Scientific). 12 hours later, fresh media was added, and 72 hours post-transfection, genomic DNA was extracted, and the expected region targeted by the Cas9 was amplified. The product size was analyzed by capillary electrophoresis with a DNA ladder standard. The intensity of the bands was analyzed using the Peak Scanner software v1.0. The percent of editing was calculated according the following formula: 100%−(Intensity not edited band/Intensity total bands)*100. FIG. 6 represents the mean activity of each gRNA following subtraction of the Dead-Cas9 background activity±SD of three independent experiments.

TABLE 2
guides sg36 through sg66 of Example 1 as identified by SEQ ID NO.

| | Example 1 | SEQ ID | |
|---|---|---|---|
| Guide sequence | gID | NO: | SNP location |
| UAGGGGUGUUAUGGUCACAG | 836 | 3752 | upstream -2590 bp |
| CACAGCGGGUGUAGACUCCG | 937 | 3753 | upstream -2590 bp |
| ACAGCGGGUGUAGACUCCGA | 938 | 3754 | upstream -2590 bp |
| CAGCGGGUGUAGACUCCGAG | 839 | 3755 | upstream -2590 bp |
| AGCGGGUGUAGACUCCGAGG | 940 | 3756 | upstream -2590 bp |
| CCGUUGCAGCUGGAACAUCG | 841 | 3757 | upstream -1475 bp |
| CGUUGCAGCUGGAACAUCGU | 942 | 3758 | upstream -1475 bp |
| GUUGCAGCUGGAACAUCGUG | 943 | 3759 | upstream -1475 bp |
| UUGCAGCUGGAACAUCGUGG | 844 | 3760 | upstream -1475 bp |
| CUGGAACAUCGUGGGGGAGA | 845 | 3761 | upstream -1475 bp |
| UGGAACAUCGUGGGGGAGAU | 946 | 3762 | upstream -1475 bp |
| AUCGUGGGGGAGAUGGGAAG | 947 | 3763 | upstream -1475 bp |
| GGAGUCCCAGCUGCGGGAAA | 957 | 3764 | upstream -1415 bp |
| GCUGCGGGAAAGGGAUUCCC | 858 | 3765 | upstream -1415 bp |
| GGGAAUCCCUUUCCCGCAGC | 859 | 3766 | upstream -1415 bp |
| GGAAUCCCUUUCCCGCAGCU | 860 | 3767 | upstream -1415 bp |
| CAAAUGUCAGAUAAUCAAUG | 927 | 3768 | upstream |
| AAAUGUCAGAUAAUCAAUGU | 828 | 3769 | upstream |
| ACCAAGGCUCAGGGCGUUGG | 867 | 3770 | Int3 |
| CCUGUUGCUGCAGUCCGGGC | 932 | 3771 | Int4 |
| CCAGCCCGGACUGCAGCAAC | 933 | 3772 | Int4 |
| UCCCUCCUAGGGUCUAGCCA | 834 | 3773 | Int4 |
| AGUCCGGGCUGGGAGCGGGU | 935 | 3774 | Int4 |
| AUGUUUAUUGUGCCAGAUGC | 829 | 3775 | 3UTR |
| GUGGGCAGCUGAGGUGACCC | 930 | 3776 | 3UTR |
| CACCCACACUCUCCAGCAUC | 831 | 3777 | 3UTR |
| UGUCAAGCCCCAGAGGCCAC | 861 | 3778 | downstream +2968 bp |
| GUCAAGCCCCAGAGGCCACA | 862 | 3779 | downstream +2968 bp |
| GUCUCUGUCCCUGUGGCCUC | 863 | 3780 | downstream +2968 bp |
| UCUCUGUCCCUGUGGCCUCU | 864 | 3781 | downstream +2968 bp |
| CUCUGUCCCUGUGGCCUCUG | 865 | 3782 | downstream +2968 bp |
| UGUCAAGCCCCAGAGGCCAC | g66 | 3778 | downstream +2968 bp |

### Example 2: Demonstrating the Feasibility of the Excision Strategies

[0432] HeLa cells were co-transfected with SpCas9-WT and RNA pairs; sg35 (INT 4) with either g39 (rs10414837), g58 (rs3761005) or g62 (rs1683564) for strategies 1a, 1b and 2, respectively. 72 h post-transfection, gDNA was extracted and excision efficiency was assessed by measuring the decrease in copy number of exon 1 (strategy 1) or exon 5 (strategy 2), using droplet digital PCR (ddPCR) kits (10042958 and 10031228, Bio-Rad Laboratories). In addition, exon 1 was used to normalize the excision rate of strategy 2 while exon 5 was used to normalize the excision rate of strategy 1. The results disclosed in Table 3 represent the mean % excision±SD (standard deviation) of two independent experiments.

TABLE 3
Tested excision rate for each strategy

| Strategy | Guide-RNA pair | Excision rate (%) |
|---|---|---|
| l.a | g39 + g35 | 49 ± 2 |
| l.b | g58 + g35 | 45 ± 9.6 |
| 2 | g62 + g35 | 41 ± 12.6 |

### Example 3: Assessing Allele Discriminating Editing with Different sgRNAs

[0433] Ribonucleoprotein complexes (RNPs) were assembled from the relevant gRNAs targeting the reference sequence and WT-Cas9 (#1081058) or HiFi Cas9 (#1081060) purchased from Integrated DNA Technology (IDT) according to the manufacturer instructions. The RNPs were then nucleofected into iPSCs harboring the relevant SNPs using the 4D-Nucleofecor® System (Lonza). 72 h later, gDNA was extracted, the SNPs regions were amplified, NGS analysis was performed. Allele discrimination was assessed according to % of editing detected in the reference and the alternative alleles. The indel-frequency in each site was calculated using Cas-Analyzer software. Results are summarized in Table 4.

TABLE 4
% Editing using indicated guide sequences

| | % of Editing | | | | | |
|---|---|---|---|---|---|---|
| | rs10414837 (g39) | | rs3761005 (g58) | | rs1683564 (g62) | |
| SpCas9 | Reference | Alternative | Reference | Alternative | Reference | Alternative |
| Varaint | Allele | Allele | Allele | Allele | Allele | Allele |
| WT-Cas9 | 65.3 | 34.7 | 50 | 50 | 100 | 0 |
| HiFi-Cas9 | 94.3 | 5.7 | 49 | 51 | 100 | 0 |

### Example 4: Editing Efficiency in HSCs

[0434] HSCs from healthy donors were nucleofected with RNA components of SpCas9-WT and gRNAs targeting either EMX1 (sgEMX1) or ELANE (g35: INT 4; g58: rs3761005; g62: rs1683564). 72 h post nucleofection gDNA was extracted and editing levels were assayed by indel detection by amplicon analysis (IDAA). FIG. 7 represents the mean % of editing±SD of two independent experiments performed in duplicates.

### Example 5: Functional Maturation Assay

[0435] To prove the rescue of the phenotype in corrected cells, a maturation assay starting from patient-derived induced pluripotent cells (iPSC), is prepared from reprogrammed somatic cells. The cells provide a renewable source of patient-derived cells and are shown to accurately replicate the disease phenotype. Briefly, patient PBMCs are transfected with episomal constructs expressing the reprogramming genes, Oct4, Sox2, Nanog, Lin28, L-Myc, Klf4, and SV40LT. Patient-derived iPSCs and normal iPSCs harboring the same SNPs genotype are differentiated into hematopoietic progenitor cells using a commercial kit (STEMdiff™ Hematopoietic Kit, STEMCELL Technologies). After 12 days the differentiation, efficiency is estimated by analyzing the cells for their expression of progenitor markers CD34 and CD45, by flow cytometry analysis. Normal and SCN differentiated progenitor cells are subjected to gene editing and are grown for five (5) days in conditioned media containing stem cell factor (SCF), IL-3, and GM-CSF that promotes the differentiation into neutrophils. SCN edited cells differentiate into neutrophils while unedited SCN-derived cells arrest at earlier differentiation stages. The efficiency of differentiation into neutrophils is measured by detecting neutrophil surface markers (e.g. upregulation of CD16, CD66b and the pan myeloid marker CD33) by flow cytometry.

### Example 6: In Vivo Pilot Dose-Range Finding and Biodistribution Study in Immunodeficient Mice

[0436] The dosing schedule, dose range, and route of administration, are studied to determine the presence and number of HSCs with self-renewal and multilineage capacity in immunodeficient NSG mice, following G-CSF administration. A repopulation assay is conducted to determine the presence and number of HSCs that are able to regenerate a functional immune system to establish long term engraftment. For such verification, the NSG strain is used, which is highly supportive of human engraftment and hematopoietic repopulation. The NSG mouse is a NOD SCID mouse lacking mature T cells, B cells, and natural killer (NK) cells, in addition to being deficient in multiple cytokine signaling pathways and having many defects in innate immunity. Engraftment is assessed 16 weeks after primary transplantation (analysis after 12 weeks post-transplant).

[0437] The 16-week pilot biodistribution study in NSG mice investigates dose and maximum duration and is conducted at several cell dose levels. The study includes three dose levels plus a group of mice receiving unedited SCN cells. Duration of the pilot study is 16 weeks; however, one of two high dose groups continues for up to 6 months. Mice survive for 6 months in the pilot study, and the duration of the pivotal biodistribution study is 6 months. During the study, persistence of expression via qPCR and immune histochemistry is studied.

### Example 7: Pivotal Biodistribution Study in Immunodeficient Mice

[0438] The pivotal biodistribution study utilizes NSG mice and follows the pilot dose-range findings of Example 6. This study is conducted in compliance with Good Laboratory Practice (GLP) and is a pivotal nonclinical pharmacokinetics, pharmacodynamics, and toxicology study. Assessment of toxicity is based on mortality, clinical observations, body and organ weights, and clinical and anatomic pathology following HSC infusion.

[0439] Transplantation of gene-edited CD34+ cells into NSG mice requires conditioning in order to provide depletion of endogenous bone marrow and to allow the engraftment of donor cells. Accordingly, busulfan-conditioning is employed to mimic the clinical situation. Three groups (gene edited cells, unedited cells and busulfan vehicle only controls) of 10 male and female mice per group are utilized.

[0440] Although the NSG mouse model is not completely similar to the human neutrophil depleted situation, this does not affect the validity of the model for use in the biodistribution study of the gene-edited CD34+ cells, since the mice at any rate are treated with busulfan, depleting the bone marrow function, before the in vivo injection of ex vivo gene edited cells.

[0441] An available neutrophil-depleted mouse strain, myeloid cell leukemia 1 (Mcl-1) antiapoptotic protein in Lyz2^{Cre/Cre}Mcl-1^{flox/flox} (Mcl-1^{ΔMyelo}) shows that myeloid-specific deletion of Mcl-1 lead to very severe neutropenia (Csepregi et al. 2018). Mcl-1^{ΔMyelo} mice are able to breed and their survival is close to normal both under specific pathogen-free and conventional housing conditions. However, in contrast to the NSG mouse, there is limited experience with the Mcl-1^{ΔMyelo} mouse model.

### Example 8: An Editing Analysis

[0442] Guide sequences comprising 21-30 contiguous nucleotides containing nucleotides in the sequence set forth in SEQ ID NOs: 1-3751 are screened for high on target activity. On target activity is determined by DNA capillary electrophoresis analysis.

[0443] According to DNA capillary electrophoresis analysis, guide sequences comprising 21-30 contiguous nucleotides containing nucleotides in the sequence set forth in SEQ ID NOs: 1-3751 are found to be suitable for correction of the ELANE gene.

### Example 9: Efficacy of Allele Specific Knockout of ELANE

[0444] Specific knock-out of the mutated allele of the ELANE gene is mediated by excising intron 4 and exon 5 of the mutant allele of the ELANE gene. This is achieved by mediating a DSB in intron 4 and utilizing SNP rs1683564 for mediating an allele specific DSB as described in FIG. 8. To demonstrate that this strategy effectively enables HSCs to differentiate into mature and functional neutrophils, healthy donors are nucleofected with HSCs (Lonza) with RNPs containing g35 and g62 targeting the respective SNP of intron 4 (See Table 1). Unedited cells are used as a positive control. Forty-eight (48) hours following nucleofection, HSCs are differentiated towards neutrophils according to a published protocol (Zhenwang Jie, et al. Plos One 2017). The differentiation efficiency of the edited and unedited cells is measured by FACS following staining with the neutrophil specific markers CD66b and CD177. To assess the function of the HSC-mediated neutrophils, the following assays are performed:
[0445] 1. Phagocytosis is assayed using the EZCell™ Phagocytosis Assay Kit (BioVision). The kit utilizes pre-labeled Zymosan particles as a tool for rapid and accurate detection and quantification of in vitro phagocytosis by flow cytometry.
[0446] 2. A killing assay is conducted by incubating the HSCs-derived neutrophils with E. coli, with the bacteria then seeded on agar plate for colonies formation. Untreated bacteria or bacteria that were incubated with undifferentiated HSCs are used as controls. The killing efficiency is calculated as follows: (# of colonies_{Neutrophils}/# of colonies_{Control})×100.
[0447] 3. Chemotaxis is assayed using the EZCell™ Cell Migration/Chemotaxis Assay Kit (Biovision).

### Example 10: Subject Selection for Treatment

[0448] Step 1: Four patients A-D diagnosed with SCN or CyN are screened by Exon sequencing to identify an ELANE pathogenic mutation in the ELANE gene. Step 2: Subjects with an identified mutation are then screened by Sanger sequencing to confirm heterozygosity of at least one of rs1683564, rs10414837 and rs3761005. Step 3: For each subject determined to be heterozygous at least one of rs1683564, rs10414837 and rs3761005, the nucleotide of the heterozygous SNP on the mutant allele of the ELANE gene is determined using BAC bio. Step 4: Appropriate guides are selected according to Table 5. The length of the selected guide is determined in accordance to the nuclease that is used to target the heterozygous SNP. In a non-limiting example, SpCas9 is used in conjunction with an RNA molecule having a guide sequence portion of 20 nucleotides. In a non-limiting example, OMNI-50 nuclease is used in conjunction with an RNA molecule having a guide sequence portion of 22 nucleotides.

TABLE 5
Guides Designed for Discriminating SNPs and used for the Editing Strategy

| Target | | SEQ | Guide | | |
|---|---|---|---|---|---|
| SNP | gRNA | ID NO: | Sequence | Location | Mechanism |
| rs10414837 | g39 | 3783 | CAGCGGGUG | Promoter | Excision, |
| | REF 20 nt | | UAGACUCCG | region | allele knock |
| | | | AG | | out |
| | g39 ALT 20 | 3784 | CAGCAGGUG | | |
| | nt | | UAGACUCCG | | |
| | | | AG | | |
| | g39 | 254 | CACAGCGGG | | |
| | REF 22nt | | UGUAGACUC | | |
| | sgRNA- | | CGAG | | |
| | 837US1-ref | | | | |
| | g39 ALT | 341 | CACAGCAGG | | |
| | 22nt | | UGUAGACUC | | |
| | sgRNA- | | CGAG | | |
| | 837US1-alt | | | | |
| rs3761005 | g58 | 3785 | GCUGCGGGA | Promoter | Excision, |
| | REF 20 nt | | AAGGGAUUC | region | allele knock |
| | | | CC | | out |
| | g58 | 3786 | GCUGCGGGA | | |
| | ALT 20 nt | | AUGGGAUUC | | |
| | | | CC | | |
| | sgRNA- | 1139 | CAGCUGCGG | | |
| | 005US2-ref | | GAAAGGGAU | | |
| | 22 nt | | UCCC | | |
| | sgRNA- | 1228 | CAGCUGCGG | | |
| | 005US2-alt | | GAAUGGGAU | | |
| | 22 nt | | UCCC | | |
| rs1683564 | 862 | 3787 | GUCAAGCCCC | Downstream | Excision, |
| | REF 20 nt | | AGAGGCCAC | to 3’UTR | allele knock |
| | | | A | | out |
| | ALT 20 nt | 3788 | GUCAAGCCCC | | |
| | | | AGAGGACAC | | |
| | | | A | | |
| | sgRNA- | 2517 | GUGUCAAGC | | |
| | 564DS-ref 22 | | CCCAGAGGC | | |
| | nt | | CACA | | |
| | sgRNA- | 2601 | GUGUCAAGC | | |
| | 564DS-alt 22 | | CCCAGAGGA | | |
| | nt | | CACA | | |
| | g35 20 nt | 2992 | AGUCCGGGC | Intron 4 | Excision, |
| | | | UGGGAGCGG | | allele knock |
| | | | GU | | out |
| | sgRNA- | 3633 | GCAGUCCGG | | |
| | Constant 22 | | GCUGGGAGC | | |
| | nt | | GGGU | | |

[0449] Step 5: The guides selected are introduced to HSCs obtained from each respective subject and reduction in the pathogenic ELANE mutation in the HSCs is verified by Next Generation Sequencing. The methodology for patients A-D is illustrated below:
[0450] 1. Patient A is screened according to step 1 and found to have a known pathogenic mutation in his ELANE gene, in agreement with his phenotype and clinical condition. Patient A is screened according to step 2, around the SNPs of interest, and is found to be homozygous for all three SNP—rs10414837, rs1683564 and rs3761005. Patient A is determined to not eligible for treatment.
[0451] 2. Patient B is verified for a known pathogenic ELANE mutation. Patient B is screened according to step 2 and is found to be homozygous for SNPs rs1683564 and rs10414837. Patient B is found to be heterozygous for rs3761005 in the promotor region. Patient B is determined to be eligible for treatment. According to step 3, the nucleotide of the SNP residing on the same allele as the pathogenic ELANE mutation (linkage determination) is determined. Patent B is found to have the reference nucleotide base in the rs3761005 SNP position on the same allele as the ELANE pathogenic mutation. g58ref is fully complementary to this SNP presentation and is selected in combination with g35 directed at the non-coding region of intron 4. According to step 4, the chosen guide composition includes a pair of guides g58ref and g35. Successful excision of the mutated allele using the selected pair of guides is verified according to step 5 on the patient HSCs using NGS readout.
[0452] 3. Patient C suffers from Severe Neutropenia since early childhood. Screening according to step A, no pathogenic mutation is found in his ELANE gene. Patient C is determined to not eligible for treatment.
[0453] 4. Patient D is verified to have a known pathogenic mutation in ELANE gene, and when genotyping his SNPs according to step 2, he is found to be heterozygous at 2 out of 3 SNPs—both rs10414837 and rs1683564 are found to be heterozygous while rs3761005 is found to be homozygous. A selection between two possible SNPs to use for the gene manipulation is made. In order to make the selection, step 3 is performed to determine the linkage between the SNPs and the pathogenic mutation, i.e. determination of which nucleotide of the SNP (reference or alternative) resides on the same allele as the ELANE pathogenic mutation (SNP presentation). Patient D is determined to have the reference presentation of rs10414837 and sg39ref is determined to be appropriate for use. Refering to the rs1683564 SNP, the alternative presentation is found to be linked to the ELANE pathogenic mutation, sg62alt is determined to be the appropriate guide for use. Each of these guides is used in combination with g35. According to Step 4, two pairs of possible guides compositions are identifed: sg39ref+g35, and g62alt+g35. To determine which of the guide pairs is preferable, a database of editing properties and characterization of each of the guides and guide pairs is assessed to determine off-target and editing efficiencies A guide pair is selected based on the database assessment, and is utilized according to step 5 on HSCs providing an NGS readout.

### Example 11: Nucleases with Improved Activity with 21 and 22 Nucleotide Guides

[0454] CRISPR repeat (crRNA), transactivating crRNA (tracrRNA), nucleases polypeptide and PAM sequences were predicted from different metagenomic databases of sequences of environmental samples. The list of bacterial species/strains from which the CRISPR repeat, tracRNA sequence and nucleases polypeptide sequence were predicted is provided in Table 6.

TABLE 6
DNA and Protein Sequences of Nucleases

| | | | DNA | DNA |
|---|---|---|---|---|
| | | Protein | Sequence | Sequence |
| | | Sequence | SEQ ID NO | SEQ ID NO |
| | | SEQ ID | (Original | (human |
| Name | Source Organism | NO: | ORF) | optimized) |
| OMNI-50 | Ezakiella peruensis | 3789 | 3790 | 3791 |
| | strain M6.X2 | | | |

### Construction of OMNI-Nuclease Polypeptides.

[0455] The open reading frame of potential OMNI candidates that were identified were codon optimized for E. coli and for human cell line expression. The E. coli optimized ORF was cloned into bacterial plasmid, pb-NNC and the human optimized into pmOMNI plasmid (Table 7).

TABLE 7
Plasmids and constructs

| | | | | SEQ ID |
|---|---|---|---|---|
| | | | | NO of |
| | | | | DNA |
| Plasmid | Purpose | Elements | Example | sequence |
| pET9a | Expression | T7 promoter—SV40 | pET9a | 3792 |
| | and | NLS—OMNI ORF | OMNI-50- | |
| | purification | (human optimized)— | HisTag | |
| | of OMNI | HA—SV40 NLS—8 | | |
| | proteins | His-tag—T7 terminator | | |
| pmOMNI | Expressing | CMV promoter— | pmOMNI | 3793 |
| | OMNI | Kozak—SV40 NLS— | OMNI50 | |
| | polypeptide | OMNI ORF (human | | |
| | in the | optimized)—HA— | | |
| | mammalian | SV40 NLS—P2A— | | |
| | system | mCheny—bGH poly(A) | | |
| | | signal | | |
| pmGuide | Expressing | U6 promoter— | pmGuide | 3794 |
| Endogenic | OMNI | Endogenicnspacer | OMNI50 | |
| site | sgRNA in | sgRNA scaffold | ELANE | |
| | the | | g35 | |
| | mammalian | | sgRNA | |
| | system | | V2 | |

TABLE 7 APPENDIX
Details of construct elements

| Element | Protein Sequence | DNA sequence |
|---|---|---|
| HA Tag | SEQ ID NO: 3795 | SEQ ID NO: 3796 |
| NLS | SEQ ID NO: 3797 | SEQ ID NO: 3798 |
| P2A | SEQ ID NO: 3799 | SEQ ID NO: 3800 |
| mCherry | SEQ ID NO: 3801 | SEQ ID NO: 3802 |

### Expression of OMNI Nucleases Coded by an Optimized DNA Sequence in Mammalian Cells

[0456] First, expression of the optimized DNA sequences coding for the OMNI-50 protein in mammalian cells, was validated. To this end, an expression vector coding for an HA-tagged OMNI nuclease or Streptococcus pyogenes Cas9 (SpCas9) linked by P2A peptide to mCherry (pmOMNI, Table 7) was introduced into HeLa cells using the Jet-optimus™ transfection reagent (polyplus-transfection). P2A peptide is a self-cleaving peptide which can induce the cleavage of the recombinant protein in cell, such that the OMNI nuclease and the mCherry are separated upon expression and the mCherry can serve as indicator for transcription efficiency of the OMNI from the expression vector. The level of transcription for OMNI-50 in the activity assays was determined using flow cytometry.

### Activity in Human Cells on Endogenous Genomic Targets

[0457] OMNI-50 was also assayed for its ability to promote editing on specific genomic locations in human cells. To this end, OMNI-50 was transfected into HeLa cells together with sgRNA designed to target specific locations in the human genome (pmGuide, Table 7). At 72 h, cells were harvested, and half were used for quantification of transfection efficiency by FACS using mCherry fluorescence as marker. The rest of the cells were lysed, and their genomic DNA content was used in PCR reaction, amplifying the corresponding putative genomic targets. Amplicons were subjected to NGS and the resulting sequences were then used calculate the percentage of editing events in each target site. Short Insertions or deletions (indels) around the cut site are the typical outcome of repair of DNA ends following nuclease-induced DNA cleavage. The calculation of % editing was therefore deduced from the fraction of indels containing sequences within each amplicon. All editing values were normalized to the transfection and translation efficacy obtained for each experiment and deduced from the percentage of mCherry expressing cells. The normalized values represent the effective editing levels within the population of cells that expressed the nuclease. Genomic activity of OMNI-50 was assessed using a panel of 11 unique sgRNAs, each designed to target a different genomic location. The results of these experiments are summarized in Table 8. As can be seen in the table, OMNI-50 exhibits high and significant editing levels compared to the negative control in all target sites tested.

TABLE 8
Activity in human cells on endogenous genomic targets

| | | | | 3′ | | | | | | |
|---|---|---|---|---|---|---|---|---|---|---|
| | | | | (PAM | | | | | % | Norm, |
| | | | | con- | | | | | trans- | % |
| | | Corre- | | taining | | | | % | fection | editing |
| | | sponding | | genomic | | % | Norm, | editing | in | in |
| Nu- | Genomic | Spacer | Spacer | seq | % | trans- | % | in neg | neg | neg |
| clease | site | name | sequence | Bold | indels | fection | editing | control | control | control |
| OMNI- | EMXI | EMX1g1_ | UCUGUGA | GGGA | 44.18 | | | 0.02 | | |
| 50 | site 2 | OMNI- | AUGUUAG | GCAG | -25.72 | | | | | |
| | | 50 | ACCCAU | | | | | | | |
| | | | (SEQ ID | | | | | | | |
| | | | NO: 3803) | | | | | | | |
| | EMXI | EMX1g2_ | CCAUGGG | AGGG | 55.81 | | | | | |
| | site 3 | OMNI- | AGCAGCU | GACC | | | | | | |
| | | 50 | GGUCAG | | | | | | | |
| | | | (SEQ ID | | | | | | | |
| | | | NO: 3804) | | | | | | | |
| | CXCR4 | CXCR4g1_ | GCAAGAG | AGGA | 29.58 | | | 0.18 | | |
| | site 3 | OMNI- | ACCCACA | GCGC | -32.14 | | | | | |
| | | 50 | CACCGG | | | | | | | |
| | | | (SEQ ID | | | | | | | |
| | | | NO: 3805) | | | | | | | |
| | CXCR4 | CXCR4g2_ | ACACCGG | TGGG | 42.13 | | | 0.22 | | |
| | site 4 | OMNI- | AGGAGCG | GGAG | -49.85 | | | | | |
| | | 50 | CCCGCU | | | | | | | |
| | | | (SEQ ID | | | | | | | |
| | | | NO: 3806) | | | | | | | |
| | PDCD1 | PDCD1g1_ | CGUCUGG | TGGG | 13.35 | | | 0.05 | | |
| | site 4 | OMNI- | GCGGUGC | CTGG | -8.7 | | | | | |
| | | 50 | UACAAC | | | | | | | |
| | | | (SEQ ID | | | | | | | |
| | | | NO: 3807) | | | | | | | |
| | PDCD1 | PDCD1g2_ | CUACAAC | AGGA | 17.53 | | | | | |
| | site 5 | OMNI- | UGGGCUG | TGGT | | | | | | |
| | | 50 | GCGGCC | | | | | | | |
| | | | (SEQ ID | | | | | | | |
| | | | NO: 3808) | | | | | | | |
| | ELANE | ELANEg35_ | AGUCCGG | GGGG | 40.92 | | | 0.24 | 5.95 | 3.9822 |
| | g35 | OMNI- | GCUGGGA | AGCA | -55.39 | | | | | 25429 |
| | | 50 | GCGGGU | | | | | | | |
| | | | (SEQ ID | | | | | | | |
| | | | NO: 2992) | | | | | | | |
| | ELANE | ELANEg58_ | GCUGCGG | TGGG | 11.11 | 20.50 | 54.23 | 0.18 | 5.95 | 2.9745 |
| | g58 | OMNI- | GAAAGGG | ACTC | | | | | | 53445 |
| | | 50 | AUUCCC | | | | | | | |
| | | | (SEQ ID | | | | | | | |
| | | | NO: 3809) | | | | | | | |
| | ELANE | ELANEg38_ | ACAGCGG | GGGG | 9.99 | | | | | |
| | g38 | OMNI- | GUGUAGA | GACG | | | | | | |
| | | 50 | CUCCGA | | | | | | | |
| | | | (SEQ ID | | | | | | | |
| | | | NO: 3810) | | | | | | | |
| | ELANE | ELANEg39_ | CAGCGGG | GGGG | 24.87 | | | | | |
| | g39 | OMNI- | UGUAGAC | ACGT | | | | | | |
| | | 50 | UCCGAG | | | | | | | |
| | | | (SEQ ID | | | | | | | |
| | | | NO: 3811) | | | | | | | |
| | ELANE | ELANEg62_ | GUCAAGC | GGGA | 38.87 | | | 0.12 | 5.95 | 2.0025 |
| | 862 | OMNI- | CCCAGAG | CAGA | -52.74 | | | | | 03126 |
| | | 50 | GCCACA | | | | | | | |
| | | | (SEQ ID | | | | | | | |
| | | | NO: 3812) | | | | | | | |

### Intrinsic Fidelity in Human Cells:

[0458] The intrinsic fidelity of a nuclease is a measure of its cleavage specificity. A high fidelity nuclease is a nuclease that promotes cleavage on the intended target (“on-target”) with minimal or no cleavage of the unintended target (“Off-target”). In CRISPR nuclease the target is acquired based on sequence complementarity to the spacer element of the guide RNA. Off targeting results from similarity of an unintended target to the spacer sequence. The intrinsic fidelity of OMNIs at the genomic level in human cells was measured by conducting an activity assay as described, following PCR amplification, NGS, and InDel analysis for both the on-target region and a pre-validated off-target region. A measurement of intrinsic fidelity for OMNI-50 is provided in FIG. 9. In this example, OMNI-50 fidelity was measured using two guide RNAs independently, in each case a side-by-side measurement of SpCas9 is provided for reference. The first site was targeted using the ELANE g35 gRNA (Table 8) which has a defined on-target upstream to the ELANE gene on chr19 and off-target on chr15. As can be seen in FIG. 9, the on/off target editing efficiency ratio obtained by OMNI-50 was 41:0 while the SpCas9 on/off ratio is 6.8:1 (40.9%/0%; 18.6%/2.7% respectively). The second site was targeted by ELANE g62 gRNA (Table 8). This gRNA spacer sequence has a defined on-target at the ELANE gene on chr19 and an off-target on chr1. In this case, the On/Off ratio obtained by OMNI-50 was 72:1 compare to 1.7:1 ratio obtained by SpCas9 (38.9%/0.6%; 43.1%/25.8% respectively). These results demonstrate that OMNI-50 has a significantly higher intrinsic fidelity in comparison to SpCas9 in a human cellular environment.

### Purification of OMNIs Protein.

[0459] OMNI-50 open-reading frame was cloned into bacterial expression plasmids (T7-NLS-OMNI-NLS-HA-His-tag, pET9a, Table 7) and expressed in C43 cells (Lucigen). Cells were grown in Terrific Broth to mid-log phase and the temperature lowered to 18° C. Expression was induced at 0.6 OD with 1 mM IPTG for 16-20 h before harvesting and freezing cells at −80° C. Cell paste was resuspended in lysis buffer (50 mM NaH₂PO₄, 300 mM NaCl, 10 mM imidazole pH8.0, 1 mM TCEP) supplemented with EDTA-free complete protease inhibitor cocktail set III (Calbiochem). Cells were lysed using sonication and cleared lysate was incubated with Ni-NTA resin. The resin was loaded onto gravity column and washed with wash buffer (50 mM NaH₂PO₄, 300 mM NaCl, 50 mM imidazole pH8.0, 1 mM TCEP) and OMNI protein was eluted with wash buffer supplemented with 100-500 mM Imidazole. Fractions containing OMNI protein were pooled and concentrated and loaded onto a centricone (Amicon Ultra 15 ml 100K, Merck), and buffer exchanged to GF buffer (50 mM Tris-HCl pH 7.5, 500 mM NaCl, 10% glycerol, 0.4M Arginine). The concentrated OMNI protein was further purified by SEC on HiLoad 16/600 Superdex 200 pg-SEC, AKTA Pure (GE Healthcare Life Sciences) with a 50 mM Tris-HCl pH 7.5, 500 mM NaCl, 10% glycerol, 0.4M Arginine. Fractions containing OMNI protein were pooled, concentrated, and loaded onto a centricone (Amicon Ultra 15 ml 100K, Merck) with a final storage buffer of 10 mM Tris-HCl, pH 7.5, 150 mM NaCl, 10% glycerol and 1 mM TCEP. Purified OMNI protein was concentrated to 10 mg/ml stocks and flash-frozen in liquid nitrogen and stored at −80° C.

### Guide Optimization by RNP Activity Assay.

[0460] Synthetic sgRNAs of OMNI-50 were synthesized with three 2′-O-methyl 3′-phosphorothioate at the 3′ and 5′ ends (Agilent). Activity assay of OMNI-50 RNP with different spacer lengths (17-23 nucleotides) of guide 35 (Table 9, FIG. 10A). Briefly, 4 pmol of OMNI-50 nuclease were mixed with 6 pmol of synthetic guide. After 10 minutes of incubation at room-temp, the RNP complexes were reacted with 100 ng template of On-target. Only spacers larger than 22 nucleotides show near full cleavage of the On-target template. Furthermore, reducing amounts of RNPs (4, 2, 1.2, 0.6 and 0.2 μmol) with spacer lengths 20-23 were reacted with 100 ng DNA target template (FIG. 10B). Spacer at lengths 22 nucleotides shows better cleavage activity even at lower RNP concentrations.

TABLE 9
synthetic sgRNA (RNP)

| | O50_ | O50_ | O50_ | O50_ | O50_ |
|---|---|---|---|---|---|
| | ELANE_V2_ | ELANE_V2_ | ELANE_V2_ | ELANE_V2_ | ELANE_V2_ |
| Name | g35_23 | g35_22 | g35_21 | g35_20 | g35_19 |
| Spacer | UgcAGUCC | gcAGUCCG | cAGUCCGG | AGUCCGG | GUCCGGG |
| | GGGCUGG | GGCUGGG | GCUGGGA | GCUGGGA | CUGGGAG |
| | GAGCGGG | AGCGGGU | GCGGGU | GCGGGU | CGGGU |
| | U (SEQ ID | (SEQ ID NO: | (SEQ ID NO: | (SEQ ID NO: | (SEQ ID NO: |
| | NO: 3813) | 3633) | 3273) | 2992 | 3814) |
| Scaffold | gUUUGAG | gUUUGAG | gUUUGAG | gUUUGAG | gUUUGAG |
| | AGUUAUG | AGUUAUG | AGUUAUG | AGUUAUG | AGUUAUG |
| | UAAgaaaU | UAAgaaaU | UAAgaaaU | UAAgaaaU | UAAgaaaU |
| | UACAUGA | UACAUGA | UACAUGA | UACAUGA | UACAUGA |
| | CGAGUUC | CGAGUUC | CGAGUUC | CGAGUUC | CGAGUUC |
| | AAAUAAA | AAAUAAA | AAAUAAA | AAAUAAA | AAAUAAA |
| | AAUUUAU | AAUUUAU | AAUUUAU | AAUUUAU | AAUUUAU |
| | UCAAACC | UCAAACC | UCAAACC | UCAAACC | UCAAACC |
| | GCCUAUU | GCCUAUU | GCCUAUU | GCCUAUU | GCCUAUU |
| | UAUAGGC | UAUAGGC | UAUAGGC | UAUAGGC | UAUAGGC |
| | CGCAGAU | CGCAGAU | CGCAGAU | CGCAGAU | CGCAGAU |
| | GUUCUGC | GUUCUGC | GUUCUGC | GUUCUGC | GUUCUGC |
| | AUUAUGC | AUUAUGC | AUUAUGC | AUUAUGC | AUUAUGC |
| | UUGCUAU | UUGCUAU | UUGCUAU | UUGCUAU | UUGCUAU |
| | UGCAAGC | UGCAAGC | UGCAAGC | UGCAAGC | UGCAAGC |
| | UUUUUU | UUUUUU | UUUUUU | UUUUUU | UUUUUU |
| | (SEQ ID NO: | (SEQ ID NO: | (SEQ ID NO: | (SEQ ID NO: | (SEQ ID NO: |
| | 3815) | 3815) | 3815) | 3815) | 3815) |
| Version | V2 | V2 | V2 | V2 | V2 |
| Full sgRNA | UgcAGUCC | gcAGUCCG | cAGUCCGG | AGUCCGG | GUCCGGG |
| sequence | GGGCUGG | GGCUGGG | GCUGGGA | GCUGGGA | CUGGGAG |
| | GAGCGGG | AGCGGGU | GCGGGUg | GCGGGUg | CGGGUgU |
| | UgUUUGA | gUUUGAG | UUUGAGA | UUUGAGA | UUGAGAG |
| | GAGUUAU | AGUUAUG | GUUAUGU | GUUAUGU | UUAUGUA |
| | GUAAgaaa | UAAgaaaU | AAgaaaUU | AAgaaaUU | AgaaaUUAC |
| | UUACAUG | UACAUGA | ACAUGAC | ACAUGAC | AUGACGA |
| | ACGAGUU | CGAGUUC | GAGUUCA | GAGUUCA | GUUCAAA |
| | CAAAUAA | AAAUAAA | AAUAAAA | AAUAAAA | UAAAAAU |
| | AAAUUUA | AAUUUAU | AUUUAUU | AUUUAUU | UUAUUCA |
| | UUCAAAC | UCAAACC | CAAACCG | CAAACCG | AACCGCC |
| | CGCCUAU | GCCUAUU | CCUAUUU | CCUAUUU | UAUUUAU |
| | UUAUAGG | UAUAGGC | AUAGGCC | AUAGGCC | AGGCCGC |
| | CCGCAGA | CGCAGAU | GCAGAUG | GCAGAUG | AGAUGUU |
| | UGUUCUG | GUUCUGC | UUCUGCA | UUCUGCA | CUGCAUU |
| | CAUUAUG | AUUAUGC | UUAUGCU | UUAUGCU | AUGCUUG |
| | CUUGCUA | UUGCUAU | UGCUAUU | UGCUAUU | CUAUUGC |
| | UUGCAAG | UGCAAGC | GCAAGCU | GCAAGCU | AAGCUUU |
| | CUUUUUU | UUUUUU(S | UUUUU | UUUUU | UUU (SEQ |
| | (SEQ ID NO: | EQ ID NO: | (SEQ ID NO: | (SEQ ID NO: | ID NO: |
| | 3816) | 3817) | 3818) | 3819) | 3820) |
| Protospacer | CTGTTGCT | CTGTTGCT | CTGTTGCT | CTGTTGCT | CTGTTGCT |
| (with PAM = | GCAGTCC | GCAGTCC | GCAGTCC | GCAGTCC | GCAGTCC |
| Bold)-On | GGGCTGG | GGGCTGG | GGGCTGG | GGGCTGG | GGGCTGG |
| target | GAGCGGG | GAGCGGG | GAGCGGG | GAGCGGG | GAGCGGG |
| | TGGGGAG | TGGGGAG | TGGGGAG | TGGGGAG | TGGGGAG |
| | CAGAGGG | CAGAGGG | CAGAGGG | CAGAGGG | CAGAGGG |
| | (SEQ ID NO: | (SEQ ID NO: | (SEQ ID NO: | (SEQ ID NO: | (SEQ ID NO: |
| | 3821) | 3821) | 3821) | 3821) | 3821) |
| Protospacer | GTTAAGAg | GTTAAGAg | GTTAAGAg | GTTAAGAg | GTTAAGAg |
| (with PAM = | aCAGTCCa | aCAGTCCa | aCAGTCCa | aCAGTCCa | aCAGTCCa |
| Bold)- | GGCTGGG | GGCTGGG | GGCTGGG | GGCTGGG | GGCTGGG |
| Off target | AGCaGGT | AGCaGGT | AGCaGGT | AGCaGGT | AGCaGGT |
| | GGGGAGA | GGGGAGA | GGGGAGA | GGGGAGA | GGGGAGA |
| | GGAGGG | GGAGGG | GGAGGG | GGAGGG | GGAGGG |
| | (SEQ ID NO: | (SEQ ID NO: | (SEQ ID NO: | (SEQ ID NO: | (SEQ ID NO: |
| | 3822) | 3822) | 3822) | 3822) | 3822) |

| | O50_ | O50_ | O50_ | O50_ |
|---|---|---|---|---|
| | ELANE_V2_ | ELANE_V2_ | ELANE_V3_ | ELANE_V4_ |
| Name | g35_18 | g35_17 | g35_20 | g35_20 |
| Spacer | UCCGGGCUG | CCGGGCUGG | AGUCCGGGC | AGUCCGGGC |
| | GGAGCGGGU | GAGCGGGU | UGGGAGCGG | UGGGAGCGG |
| | (SEQ ID NO: | (SEQ ID NO: | GU (SEQ ID | GU (SEQ ID |
| | 3823) | 3824) | NO: 2992) | NO: 2992) |
| Scaffold | gUUUGAGAG | gUUUGAGAG | gUUUGAGAG | gUUUGAGAG |
| | UUAUGUAAga | UUAUGUAAga | UUAUGUgaaaA | UUAUGUAgaaa |
| | aaUUACAUGA | aaUUACAUGA | CAUGACGAG | UACAUGACG |
| | CGAGUUCAA | CGAGUUCAA | UUCAAAUAA | AGUUCAAAU |
| | AUAAAAAUU | AUAAAAAUU | AAAUUUAUU | AAAAAUUUA |
| | UAUUCAAAC | UAUUCAAAC | CAAACCGCCU | UUCAAACCG |
| | CGCCUAUUU | CGCCUAUUU | AUUUAUAGG | CCUAUUUAU |
| | AUAGGCCGC | AUAGGCCGC | CCGCAGAUG | AGGCCGCAG |
| | AGAUGUUCU | AGAUGUUCU | UUCUGCAUU | AUGUUCUGC |
| | GCAUUAUGC | GCAUUAUGC | AUGCUUGCU | AUUAUGCUU |
| | UUGCUAUUG | UUGCUAUUG | AUUGCAAGC | GCUAUUGCA |
| | CAAGCUUUU | CAAGCUUUU | UUUUUU (SEQ | AGCUUUUUU |
| | UU (SEQ ID | UU (SEQ ID | ID NO: 3825) | (SEQ ID NO: |
| | NO: 3815) | NO: 3815) | | 3826) |
| Version | V2 | V2 | V3 | V4 |
| Full sgRNA | UCCGGGCUG | CCGGGCUGG | AGUCCGGGC | AGUCCGGGC |
| sequence | GGAGCGGGUg | GAGCGGGUgU | UGGGAGCGG | UGGGAGCGG |
| | UUUGAGAGU | UUGAGAGUU | GUgUUUGAG | GUgUUUGAG |
| | UAUGUAAgaaa | AUGUAAgaaaU | AGUUAUGUga | AGUUAUGUA |
| | UUACAUGAC | UACAUGACG | aaACAUGACG | gaaaUACAUGA |
| | GAGUUCAAA | AGUUCAAAU | AGUUCAAAU | CGAGUUCAA |
| | UAAAAAUUU | AAAAAUUUA | AAAAAUUUA | AUAAAAAUU |
| | AUUCAAACC | UUCAAACCG | UUCAAACCG | UAUUCAAAC |
| | GCCUAUUUA | CCUAUUUAU | CCUAUUUAU | CGCCUAUUU |
| | UAGGCCGCA | AGGCCGCAG | AGGCCGCAG | AUAGGCCGC |
| | GAUGUUCUG | AUGUUCUGC | AUGUUCUGC | AGAUGUUCU |
| | CAUUAUGCU | AUUAUGCUU | AUUAUGCUU | GCAUUAUGC |
| | UGCUAUUGC | GCUAUUGCA | GCUAUUGCA | UUGCUAUUG |
| | AAGCUUUUU | AGCUUUUUU | AGCUUUUUU | CAAGCUUUU |
| | U (SEQ ID | (SEQ ID NO: | (SEQ ID NO: | UU (SEQ ID |
| | NO: 3827) | 3828) | 3829) | NO: 3830) |
| Protospacer | CTGTTGCTGC | CTGTTGCTGC | CTGTTGCTGC | CTGTTGCTGC |
| (with PAM = | AGTCCGGGCT | AGTCCGGGCT | AGTCCGGGCT | AGTCCGGGCT |
| Bold)-On | GGGAGCGGG | GGGAGCGGG | GGGAGCGGG | GGGAGCGGG |
| target | TGGGGAGCA | TGGGGAGCA | TGGGGAGCA | TGGGGAGCA |
| | GAGGG (SEQ | GAGGG (SEQ | GAGGG (SEQ | GAGGG (SEQ |
| | ID NO: 3821) | ID NO: 3821) | ID NO: 3821) | ID NO: 3821) |
| Protospacer | GTTAAGAgaC | GTTAAGAgaC | GTTAAGAgaC | GTTAAGAgaC |
| (with PAM = | AGTCCaGGCT | AGTCCaGGCT | AGTCCaGGCT | AGTCCaGGCT |
| Bold)- | GGGAGCaGGT | GGGAGCaGGT | GGGAGCaGGT | GGGAGCaGGT |
| Off target | GGGGAGAGG | GGGGAGAGG | GGGGAGAGG | GGGGAGAGG |
| | AGGG (SEQ ID | AGGG (SEQ ID | AGGG (SEQ ID | AGGG (SEQ ID |
| | NO: 3822) | NO: 3822) | NO: 3822) | NO: 3822) |

[0461] Spacer length optimization was also performed in a cell line context. RNPs were assembled by mixing 100 uM nuclease with 120 uM of synthetic guide with different spacer lengths (17-23 nt, Table 4) (and 100 uM Cas9 electroporation enhancer (IDT). After 10 min of incubation at room-temp, the RNP complexes were mixed with 200,000 pre-washed U2OS cells and electroporated using Lonza SE Cell Line 4D-Nucleofector X Kit with the DN100 program, according to the manufacture's protocol. At 72 h cells were lysed, and their genomic DNA content was used in PCR reaction, amplifying the corresponding putative genomic targets. Amplicons were subjected to NGS and the resulting sequences were then used calculate the percentage of editing events. As can be seen in FIG. 10C spacers of 17-19 nucleotides show low editing level, 20 nucleotides spacers show medium editing, and spacers of 21-23 nucleotides show the highest editing level.

[0462] Using the same cell line context, different versions of tracer RNA modifications were also tested (Table 9). The different versions of sgRNA were tested with a 20 nucleotide spacer. As can be seen in FIG. 10D, RNP assembly using either sgRNA V1, V2, and V3 results in similar editing levels. However, RNP assembly using sgRNA V4 results in a significantly higher editing level.

[0463] OMNI-50 guide length effect on editing efficacy was also tested in iPSCs. Cells were nucleofected with OMNI-50 RNP complexes containing guides of different spacer lengths (17-23 nt, table 4). Cells were harvested 72 h post nucleofection, gDNA was used for site specific genomic DNA amplification and capillary gel electrophoresis analysis using sg35 on-target primers, which amplify the endogenous genomic region within the target gene. The capillary gel electrophoresis data was used to determine the Total % Editing. As can be seen in FIG. 11, a spacer length of 19 nt showed levels of editing similar to background (NT), a 20 nucleotide spacer resulted in medium editing levels, and 21-23 nt spacers resulted in the most significant editing levels, in agreement with the in vitro and the U2OS experiment described above.

### Example 12: Validation of ELANE-Editing Compositions

[0464] As noted above, mutations in the ELANE gene are a cause of severe congenital neutropenia (SCN), which is a predominantly autosomal dominant disorder. Hereinbelow an example of a therapeutic approach by differentially knocking out an ELANE mutant allele is presented. This can be accomplished by targeting a heterozygous rs1683564 SNP located downstream to the 3′UTR of ELANE and mediating a biallelic break in intron 4, which leads to excision of exon 5 and the 3′UTR, thereby destabilizing the transcript of the ELANE mutated allele (FIG. 15).

[0465] To validate the ELANE-editing composition as a treatment in patient-derived CD34+ hematopoietic stem cells (HSCs), a differentiation protocol was established. The protocol recapitulates the intrinsic defect observed in neutropenic patients by in-vitro differentiating HSCs from healthy volunteers and patients harboring ELANE mutations into neutrophils (FIG. 16A). Impaired neutrophil differentiation capacity was revealed in untreated patient derived HSCs harboring G221-termination (G221ter) or S126L ELANE mutations, displaying a 4-fold greater CD14+ monocytes and 2-fold decrease in CD66b+ neutrophils in comparison to healthy donor, consistent with the hematopoietic defect in SCN patients (FIG. 16B; FIG. 17A left panel).

[0466] To understand if the therapeutic composition rescues neutrophil differentiation and maturation defects, HSCs from a patient harboring a G221ter mutation and homozygous to the reverence form of rs1683564 was edited to excise ELANE's downstream region. This was performed by utilizing RNPs assembled from an OMNI-50 nuclease and sgRNA-564DS-ref (sg62-REF)+sgRNA constant (sg35), leading to biallelic knockout. The edited cells were then subjected to neutrophil differentiation. Excised HSCs rescued the differentiation defect leading to a 100% increase in CD14⁺ CD66b⁺ positive cells while reducing the monocytic population to normal levels in comparison to the healthy donor. Excision efficiency evaluated at day 5 and 14 of differentiation revealed a 50% enrichment of the excised population in patient cells from 30% to 45% in contrast to the healthy donor, which was consistent between both timepoints with 40% excision. This suggests a favorable therapeutic advantage for the corrected cells (FIGS. 16B-D).

[0467] Next the therapeutic composition was tested on patient HSCs harboring a S126L mutation and normal HSCs, both heterozygous for rs1683564, by utilizing RNPs assembled from OMNI-50, sgRNA-564DS-ref targeting rs1683564 reference or sgRNA-564DS-alt targeting alternative sequence, with sgRNA constant targeting the region in intron 4. The single-allele ELANE knockout composition targeting the rs1683564 reference linked to a S126L mutation resulted in deletion of the ELANE mutated allele, significantly rescued the observed differentiation abnormalities, and lead to a 100% increase in CD14⁺CD66b⁺ positive cells while reducing the monocytic population to normal. Notably, the single-allele ELANE knockout composition targeting the rs1683564 alternative resulted in deletion of the WT ELANE allele and displayed an intermediate rescue phenotype with a 50% increase in CD14⁺CD66b⁺ positive cells and 50% reduction in monocytic population (FIGS. 17A and 17B). Excision efficiency evaluated at day 4 and 14 of differentiation revealed higher efficiency with the reference allele than the alternative allele leading to ˜40% and ˜25% excision rate, respectively (FIG. 17C).

[0468] To further understand the discordance in excision efficiency between the alternative and reference guides, allele specificity of each of the guides was tested. While sgRNA-564DS-alt depicted a high degree of specificity, sgRNA-564DS-ref showed differential editing represented by the editing of mainly the reference allele and to some extent of the alternative allele as well. This explains the high degree of excision efficiency between the two guides targeting rs1683564 (FIG. 17D).

[0469] To assess the effect of the excision on the level of ELANE mRNA, total RNA was extracted from the differentiated cells and the mRNA level of ELANE was measured by qRT-PCR using primers located in regions that were not excised. The results depict more than a 50% reduction in the level of ELANE mRNA due to RNA destabilization with both reference and alternative excision compositions in normal and patient cells in comparison to untreated cells (FIG. 17E). In addition, a differential reduction in the edited alleles was determined by NGS. cDNA reads of mutated or WT ELANE allele were diminished when excising was performed with sgRNA-564DS-ref or sgRNA-564DS-alt, respectively. This result emphasizes that both excision strategies lead to reduction in the expression of ELANE in a differential manner (FIG. 17F).

TABLE 10
Guide sequence targeting rs1683564 (ref/alt), heterozygous in 42% of the
population, and non-discriminatory region (sgRNA constant).

| | Target cut site | | | Heterozygous |
|---|---|---|---|---|
| sgRNA | genomic location | Sequence | Location | Frequency |
| sgRNA- | rs1683564 | GUGUCAAGCCCC | Downstream | 42% |
| 564DS-ref | chr19:859199-859218 | AGAGGCCACA | to 3’UTR | |
| | | (SEQ ID NO: 2517) | | |
| sgRNA- | | GUGUCAAGCCCC | | |
| 564DS-alt | | AGAGGACACA | | |
| | | (SEQ ID NO: 2601) | | |
| sgRNA | chr19:855822-855844 | GCAGUCCGGGC | Intron 4 | N/A |
| constant | | UGGGAGCGGGU | | |
| | | (SEQ ID NO: 3633) | | |

[0470] These results show excision-based rescue effects neutrophil differentiation in patient-derived HSCs and demonstrate that these compositions serve as powerful SCN therapeutic.

### Example 13: Off-Target Analysis of OMNI-50 with sgRNAs Relevant to the Therapeutic Strategies of ELANE-Related SCN

[0471] To characterize the off-target activity of OMNI-50, we utilized a GUIDE-Seq methodology. This is a molecular biology technique that allows for the unbiased in vitro detection of off-target genome editing events in DNA caused by CRISPR/Cas9 as well as other RNA-guided nucleases (RGN) in living cells. Blunt-ended CRISPR RNA-guided nucleases (RGN)-induced DSBs in the genomes of living human cells are tagged by integration of a blunt double-stranded oligodeoxynucleotide (dsODN) at these breaks via an end-joining process consistent with NHEJ. dsODN integration sites in genomic DNA are precisely mapped at the nucleotide level using unbiased amplification and deep NGS.

[0472] For the study, a U2OS cell line was used and the following dsODN sequence was integrated (100 pmol): ATACCGTTATTAACATATGACAACTCAATTAAAC (SEQ ID NO: 3831). The tested guides were the ELANE constant guide and the sgRNA-564DS-ref guide.

[0473] The experiment was performed with two technical repeats and sequenced using deep next generation sequencing. GUIDE-seq library preparation was performed according to Tsai et al., Nat Biotechnology, 2015 with minor modifications. The sequencing results were analyzed via “GUIDE-Seq analysis” published by Tsai et al., Nat Biotechnology (2015). Identified off-targets, sorted by GUIDE-Seq read count, are annotated in a final output table. Alignment of detected off-target sites is visualized via a color-coded sequence grid, as seen in FIG. 18.

[0474] The results from technical repeats were merged to a single list and off targets were chosen for validation via rhAmpseq technology (IDT). The rhAmpseq system enables targeted amplicon sequencing with multiplexed panels for sequencing on Illumina platforms.

[0475] For generation of rhAmpseq panels, the following filters were applied on the final off-target list generated by GUIDE-seq analysis:

TABLE 11
Reads filtering criteria for generation of rhAmpSeq panels

| | OT in | | |
|---|---|---|---|
| | gene | Reads | Reads |
| Nuclease | (Yes/No) | sample A | sample B |
| SpCas9 | Yes | ≥100 | ≥100 |
| SpCas9 | No | ≥500 | ≥500 |

| | | |
|---|---|---|
| OMNI-50 | Yes | No Filter |
| OMNI-50 | No | No Filter |

[0476] The final panels had the following off targets:

TABLE 12
Number of off targets in each panel

| | Number of |
|---|---|
| Guide | Off targets |
| Constant guide | 110 |
| sgRNA-564DS-ref | 26 |
| sgRNA-564DS-Alt | 23 |

[0477] For validation of the off-targets, an IDT rhAmpseq protocol was used with the panels generated for the ELANE constant guide and the sgRNA-564DS-ref guide. U2OS cells were edited with the mentioned RNA guides either with SpCas9 or OMNI-50 nucleases (FIG. 19 and FIG. 20). The rhAmpseq libraries were sequenced by NextSeq PE150 sequencing and analyzed with an IDT pipeline.

[0478] The results described in FIGS. 19 and 20 indicate that OMNI-50 displays high on-target activity and specificity, relative to SpCas9. Out of 110 off-targets that were analyzed for sgConstant, OMNI-50 had an editing activity of >0.5% on only one site (OT-2), compared to more than 60 sites with SpCas9. In the case of sgRNA-564DS-Ref, although OMNI-50 had higher on target activity than SpCas9, only 2 out of 25 off-target sites showed editing levels higher than 0.5% as opposed to SpCas9 which had 14 sites with a % of editing value higher than 0.5%.

[0479] In addition, we validated the off-target panels on patient-derived HSCs treated with either the constant guide and the sgRNA-564DS-ref or with the constant guide and the sgRNA-564DS-Alt guide (See example as described for FIG. 17). This leads to excision of exon 5 and the 3′UTR, as described in FIG. 15. The results showed no validated off-targets for constant guide out of 110 targets that were examined (FIG. 21). For the sgRNA-564DS-ref guide and the sgRNA-564DS-Alt guide, one off-target to each panel was validated (FIG. 22 and FIG. 23). These results emphasize the relative high fidelity of OMNI-50 nuclease.

### REFERENCES

[0480] 1. Ahmad and Allen (1992) “Antibody-mediated Specific Binging and Cytotoxicity of Lipsome-entrapped Doxorubicin to Lung Cancer Cells in Vitro”, Cancer Research 52:4817-20
[0481] 2. Anders (1992) “Human gene therapy”, Science 256:808-13
[0482] 3. Basha et al. (2011) “Influence of Cationic Lipid Composition on Gene Silencing Properties of Lipid Nanoparticle Formulations of siRNA in Antigen-Presenting Cells”, Mol. Ther. 19(12):2186-200
[0483] 4. Behr (1994) Gene transfer with synthetic cationic amphiphiles: Prospects for gene therapy”, Bioconjuage Chem 5:382-89
[0484] 5. Blaese (1995) “Vectors in cancer therapy: how will they deliver”, Cancer Gene Ther.

[0485] 2:291-97
[0486] 6. Blaese et al. (1995) “T lympocyte-directed gene therapy for ADA-SCID: initial trial results after 4 years”, Science 270(5235):475-80
[0487] 7. Boxer, L. A. (2012) “How to approach neutropenia”, Hematology Am Soc Hematol Educ

[0488] Program 2012: 174-182
[0489] 8. Buchschacher and Panganiban (1992) “Human immunodeficiency virus vectors for inducible expression of foreign genes”, J. Virol. 66:2731-39
[0490] 9. Burstein et al. (2017) “New CRISPR-Cas systems from uncultivated microbes”, Nature 542:237-41
[0491] 10. Carlsson, G et al. (2012) “Incidence of severe congenital neutropenia in Sweden and risk of evolution to myelodysplastic syndrome/leukaemia”, Br J Haematol 158(3): 363-369
[0492] 11. Chung et al. (2006) “Agrobacterium is not alone: gene transfer to plants by viruses and other bacteria”, Trends Plant Sci. 11(1):1-4
[0493] 12. Connelly, J. A. et al. (2012) “Hematopoietic stem cell transplantation for severe congenital neutropenia”, Curr Opin Hematol 19(1): 44-51
[0494] 13. Crystal (1995) “Transfer of genes to humans: early lessons and obstacles to success”,

[0495] Science 270(5235):404-10
[0496] 14. Dale, D. C. (2017) “How I manage children with neutropenia”, Br J Haematol 178(3): 351-363
[0497] 15. Dillon (1993) “Regulation gene expression in gene therapy” Trends in Biotechnology 11(5):167-173
[0498] 16. Donadieu, J. et al. (2011) “Congenital neutropenia: diagnosis, molecular bases and patient management”, Orphanet J Rare Dis 6: 26.
[0499] 17. Dranoff et al. (1997) “A phase I study of vaccination with autologous, irradiated melanoma cells engineered to secrete human granulocyte macrophage colony stimulating factor”, Hum. Gene Ther. 8(1):111-23
[0500] 18. Donadieu et al. (2011) “Congenital neutropenia: diagnosis, molecular bases and patient management”, Orphanet J Rare Dis. 6:26
[0501] 19. Dunbar et al. (1995) “Retrovirally marked CD34-enriched peripheral blood and bone marrow cells contribute to long-term engraftment after autologous transplantation”, Blood 85:3048-57
[0502] 20. Ellem et al. (1997) “A case report: immune responses and clinical course of the first human use of ganulocyte/macrophage-colony-stimulating-factor-tranduced autologous melanoma cells for immunotherapy”, Cancer Immunol Immunother 44:10-20
[0503] 21. Gao and Huang (1995) “Cationic liposome-mediated gene transfer” Gene Ther. 2(10):710-22
[0504] 22. Germeshausen et al. (2013) “The spectrum of ELANE mutations and their implications in severe congenital and cyclic neutropenia”, Hum Mutat. 34(6):905-14
[0505] 23. Haddada et al. (1995) “Gene Therapy Using Adenovirus Vectors”, in: The Molecular Repertoire of Adenoviruses III: Biology and Pathogenesis, ed. Doerfler and Bohm, pp. 297-306
[0506] 24. Han et al. (1995) “Ligand-directed retro-viral targeting of human breast cancer cells”, Proc Natl Acad Sci U.S.A. 92(21):9747-51
[0507] 25. Horwitz, M. S. et al. (2013) “ELANE mutations in cyclic and severe congenital neutropenia: genetics and pathophysiology”, Hematol Oncol Clin North Am 27(1): 19-41, vii.
[0508] 26. Inaba et al. (1992) “Generation of large numbers of dendritic cells from mouse bone marrow cultures supplemented with granulocyte/macrophage colony-stimulating factor”, J Exp Med. 176(6):1693-702
[0509] 27. Jinek et al. (2012) “A programmable dual-RNA-guided DNA endonuclease in adaptive bacterial immunity,” Science 337(6096):816-21
[0510] 28. Johan et al. (1992) “GLVR1, a receptor for gibbon ape leukemia virus, is homologous to a phosphate permease of Neurospora crassa and is expressed at high levels in the brain and thymus”, J Virol 66(3):1635-40
[0511] 29. Judge et al. (2006) “Design of noninflammatory synthetic siRNA mediating potent gene silencing in vivo”, Mol Ther. 13(3):494-505
[0512] 30. Kim, E. et al. In vivo genome editing with a small Cas9 orthologue derived from Campylobacter jejuni. Nat. Commun. 8, 14500 (2017).
[0513] 31. Kohn et al. (1995) “Engraftment of gene-modified umbilical cord blood cells in neonates with adnosine deaminase deficiency”, Nature Medicine 1:1017-23
[0514] 32. Koonen et al. (2017) “Diversity, classification and evolution of CRIPR-Cas systems”, Current Opinion in Microbiology 37:67-78
[0515] 33. Kremer and Perricaudet (1995) “Adenovirus and adeno-associated virus mediated gene transfer”, Br. Med. Bull. 51(1):31-44
[0516] 34. Macdiarmid et al. (2009) “Sequential treatment of drug-resistant tumors with targeted minicells containing siRNA or a cytotoxic drug”, Nat Biotehcnol. 27(7):643-51
[0517] 35. Malech et al. (1997) “Prolonged production of NADPH oxidase-corrected granulocyes after gene therapy of chronic granulomatous disease”, PNAS 94(22):12133-38
[0518] 36. Makaran et al. (2015) “The diversity of mutations and clinical outcomes for ELANE-associated neutropenia”, Curr Opin Hematol. 22(1):3-11
[0519] 37. Miller et al. (1991) “Construction and properties of retrovirus packaging cells based on gibbon ape leukemia virus”, J Virol. 65(5):2220-24
[0520] 38. Miller (1992) “Human gene therapy comes of age”, Nature 357:455-60
[0521] 39. Mitani and Caskey (1993) “Delivering therapeutic genes—matching approach and application”, Trends in Biotechnology 11(5):162-66
[0522] 40. Mojica, F. J., et al. (1993) “Direct gene transfer for immunotherapy and immunization”,

[0523] Trends in Biotechnology 11(5):211-15
[0524] 41. Remy et al. (1994) “Gene Transfer with a Series of Lipphilic DNA-Binding Molecules”,

[0525] Bioconjugate Chem. 5(6):647-54
[0526] 42. Rosenberg, P. S. et al. (2010) “Stable long-term risk of leukaemia in patients with severe congenital neutropenia maintained on G-CSF therapy”, Br J Haematol 150(2): 196-199.
[0527] 43. Schaffer, A et al. (2007) “Genetic heterogeneity in severe congenital neutropenia: how many aberrant pathways can kill a neutrophil?” Curr Opin Allergy Clin Immunol 7(6): 481-494
[0528] 44. Sentmanat et al. (2018) “A Survey of Validation Strategies for CRISPR-Cas9 Editing”, Scientific Reports 8:888, doi:10.1038/s41598-018-19441-8
[0529] 45. Skokowa, J. et al. (2017) “Severe congenital neutropenias”, Nat Rev Dis Primers 3: 17032
[0530] 46. Sommerfelt et al. (1990) “Localization of the receptor gene for type D simian retroviruses on human chromosome 19”, J. Virol. 64(12):6214-20
[0531] 47. Tsai et al., (2015) “GUIDE-Seq analysis” Nat Biotechnology 33, 187-197
[0532] 48. Van Brunt (1988) “Molecular framing: transgenic animals as bioactors” Biotechnology 6:1149-54
[0533] 49. Vigne et al. (1995) “Third-generation adenovectors for gene therapy”, Restorative Neurology and Neuroscience 8(1,2): 35-36
[0534] 50. Wilson et al. (1989) “Formation of infectious hybrid virion with gibbon ape leukemia virus and human T-cell leukemia virus retroviral envelope glycoproteins and the gag and pol proteins of Moloney murine leukemia virus”, J. Virol. 63:2374-78
[0535] 51. Yu et al. (1994) “Progress towards gene therapy for HIV infection”, Gene Ther. 1(1):13-26
[0536] 52. Yu, K et al. (2016) “Gene Editing of Human Hematopoietic Stem and Progenitor Cells: Promise and Potential Hurdles”, Hum Gene Ther 27(10): 729-740
[0537] 53. Zetsche et al. (2015) “Cpf1 is a single RNA-guided endonuclease of a class 2 CRIPSR-Cas system” Cell 163(3):759-71
[0538] 54. Zhenwang et al. (2017) “Large-scale ex vivo generation of human neutrophils from cord blood CD34⁺ cells”, PLOS ONE, available at <doi.org/10.1371/journal.pone.0180832>
[0539] 55. Zuris et al. (2015) “Cationic lipid-mediated delivery of proteins enables efficient protein based genome editing in vitro and in vivo” Nat Biotechnol. 33(1):73-80

1. A method for inactivating in a cell a mutant allele of the elastase, neutrophil expressed gene (ELANE gene) gene having a mutation associated with severe congenital neutropenia (SCN) or cyclic neutropenia (CyN) and which cell is heterozygous at one or more polymorphic sites selected from the group consisting of: rs1683564, rs10424470, rs4807932, rs10414837, rs376107533, rs3761010, rs351108, rs3826946, rs10413889, rs3761007, rs10409474, rs3761005, rs351107, rs3761001, rs740021, rs781452480, rs371057361, rs570466264, rs1041904080, rs7250194, rs17216649, rs199720952, rs6510983, rs17223066, rs7255385, rs9749274, rs111361200, rs112639467, rs141213775, rs28591229, rs10469327, rs3834645,
rs71335276, and rs8107095, the method comprising introducing to the cell a composition comprising:
a CRISPR nuclease or a sequence encoding the CRISPR nuclease; and
a first RNA molecule comprising a guide sequence portion having 21-30 nucleotides,
wherein a complex of the CRISPR nuclease and the first RNA molecule affects a double strand break in the mutant allele of the ELANE gene.

2. The method of claim 1, wherein the guide sequence portion of the first RNA molecule comprises 21-30 contiguous nucleotides containing nucleotides in the sequence as set forth in any one of SEQ ID NOs: 2517, 2601, 2464-2516, 2518-2600, 2602-2613, 1-2463, 2614-3751 or SEQ ID NOs: 1-2953, or
wherein the cell is heterozygous at one or more polymorphic sites selected from the group consisting of: rs1683564, rs9749274, rs740021, rs199720952, rs28591229, rs71335276, rs3826946, rs10413889, rs3761005, rs10409474, rs3761007, rs17216649, rs10469327, rs8107095, rs10414837, and rs10424470, or
wherein the polymorphic site is rs1683564 and the guide sequence portion of the first RNA molecule comprises 21-30 contiguous nucleotides containing nucleotides in the sequence as set forth in any one of SEQ ID NOs: 2517, 2601, 2464-2516, 2518-2600, 2602-2613, 1-2463, 2614-3751, and/or
wherein the complex of the CRISPR nuclease and the first RNA molecule affects a double strand break in the mutant allele of the ELANE gene, which mutant allele is targeted for the double strand break based on the one or more polymorphic sites.

3. (canceled)

4. (canceled)

5. (canceled)

6. The method of claim 1, further comprising introduction of a second RNA molecule comprising a guide sequence portion capable of complexing with a CRISPR nuclease, wherein the complex of the second RNA molecule and CRISPR nuclease affects a second double strand break in the ELANE gene.

7. The method of claim 6, wherein the second double strand break is within a non-coding region of the ELANE gene, or
wherein the non-coding region of the ELANE gene is intron 4, and/or
wherein the guide sequence portion of the second RNA molecule comprises 21-30 contiguous nucleotides containing nucleotides in the sequence as set forth in any one of SEQ ID NOs: 2954-3751, or
wherein the cell is heterozygous at rs10414837 or rs3761005 and wherein the complex of the second RNA molecule and CRISPR nuclease affects a double strand break in intron 4 of the ELANE gene, or
wherein the cell is heterozygous at rs1683564 and wherein the complex of the second RNA molecule and CRISPR nuclease affects a double strand break in intron 4 of the ELANE gene, and/or
wherein the second RNA molecule comprises a guide sequence portion having 21-30 nucleotides.

8. (canceled)

9. (canceled)

10. (canceled)

11. (canceled)

12. (canceled)

13. The method of claim 1, comprising obtaining the cell with an ELANE gene mutation associated with severe congenital neutropenia (SCN) or CyN from a subject with an ELANE gene mutation related to SCN or CyN and/or suffering from SCN or CyN and which subject is heterozygous at one or more polymorphic sites selected from the group consisting of: rs10424470, rs4807932, rs10414837, rs376107533, rs3761010, rs351108, rs3826946, rs10413889, rs3761007, rs10409474, rs3761005, rs351107, rs3761001, rs740021, rs781452480, rs371057361, rs570466264, rs1041904080, rs7250194, rs17216649, rs199720952, rs6510983, rs17223066, rs7255385, rs9749274, rs111361200, rs112639467, rs141213775, rs28591229, rs10469327, rs3834645, rs1683564, rs71335276, and rs8107095, preferably obtaining the cell from the subject by mobilization and/or by apheresis, or by bone marrow aspiration.

14. (canceled)

15. (canceled)

16. (canceled)

17. The method of claim 1, wherein the cell is prestimulated prior to introducing the composition to the cell.

18. The method of claim 13 further comprising culture expanding the cell to obtain cells preferably wherein the cells are cultured with one or more of: stem cell factor (SCF), IL-3, and GM-CSF, and/or
wherein the cells are cultured with at least one cytokine, preferably wherein the at least one cytokine is a recombinant human cytokine.

19. (canceled)

20. (canceled)

21. (canceled)

22. (canceled)

23. The method of claim 1, wherein introducing the composition comprising the first RNA molecule or introduction of the second RNA molecule comprises electroporation of the cell or cells.

24. A modified cell obtained by the method of claim 1, wherein the cell is among a plurality of cells, wherein the composition comprising the first RNA molecule is introduced into at least the cell as well as other cells among the plurality of cells, and the mutant allele of the ELANE gene is inactivated in at least the cell as well as in the other cells among the plurality of cells, thereby obtaining multiple modified cells.

25. (canceled)

26. The modified cell or cells of claim 24, wherein the cell, or cells obtained from culture expanding the cell, are capable of
engraftment;
giving rise to progeny cells;
giving rise to progeny cells after engraftment;
giving rise to progeny cells after an autologous engraftment; or
giving rise to progeny cells for at least 12 months or at least 24 months after engraftment.

27. (canceled)

28. (canceled)

29. (canceled)

30. (canceled)

31. The modified cell or cells claim 24, wherein the modified cell or cells are hematopoietic stem cells and/or progenitor cells (HSPCs);
wherein the modified cell or cells are CD34+ hematopoietic stem cells; or
wherein the modified cell or cells are bone marrow cells or peripheral mononucleated cells (PMCs).

32. (canceled)

33. (canceled)

34. (canceled)

35. (canceled)

36. A composition comprising the modified cells of claim 24 and a pharmaceutically acceptable carrier.

37. (canceled)

38. A method of preparing in vitro or ex vivo a composition comprising modified cells, the method comprising:
(a) isolating HSPCs from cells obtained from a subject with an ELANE gene mutation related to SCN or CyN and/or suffering from SCN or CyN and which subject is heterozygous at one or more polymorphic sites selected from the group consisting of rs10424470, rs4807932, rs10414837, rs376107533, rs3761010, rs351108, rs3826946, rs10413889, rs3761007, rs10409474, rs3761005, rs351107, rs3761001, rs740021, rs781452480, rs371057361, rs570466264, rs1041904080, rs7250194, rs17216649, rs199720952, rs6510983, rs17223066, rs7255385, rs9749274, rs111361200, rs112639467, rs141213775, rs28591229, rs10469327, rs3834645, rs1683564, rs71335276, and rs8107095, and obtaining the cell from the subject;
(b) introducing to the cells of step (a) a composition comprising:
a CRISPR nuclease or a sequence encoding the CRISPR nuclease; and
a first RNA molecule comprising a guide sequence portion having 21-30 nucleotides,
wherein a complex of the CRISPR nuclease and the first RNA molecule affects a double strand break in the mutant allele of the ELANE gene in one or more cells,
optionally, introducing to the cells a second RNA molecule comprising a guide sequence portion capable of complexing with a CRISPR nuclease, wherein the complex of the second RNA molecule and CRISPR nuclease affects a second double strand break in the ELANE gene in the one or more cells
so as to inactivate the mutant allele of the ELANE gene in one or more cells thereby obtaining modified cells; optionally
(c) culture expanding the modified cells of step (b),
wherein the modified cells are capable of engraftment and giving rise to progeny cells after engraftment.

39. (canceled)

40. A method of treating a subject afflicted with SCN or CyN, comprising administration of a therapeutically effective amount of the composition of claim 36, or
treating SCN or CyN in a subject with an ELANE gene mutation relating to SCN or CYN in need thereof and which subject is heterozygous at one or more polymorphic sites selected from the group consisting of: rs10424470, rs4807932, rs10414837, rs376107533, rs3761010, rs351108, rs3826946, rs10413889, rs3761007, rs10409474, rs3761005, rs351107, rs3761001, rs740021, rs781452480, rs371057361, rs570466264, rs1041904080, rs7250194, rs17216649, rs199720952, rs6510983, rs17223066, rs7255385, rs9749274, rs111361200, rs112639467, rs141213775, rs28591229, rs10469327, rs3834645, rs1683564, rs71335276, and rs8107095, the method comprising:
(a) isolating HSPCs from cells obtained from the subject;
(b) introducing to the cells of step (a) a composition comprising:
a CRISPR nuclease or a sequence encoding the CRISPR nuclease; and
a first RNA molecule comprising a guide sequence portion having 21-30 nucleotides,
wherein a complex of the CRISPR nuclease and the first RNA molecule affects a double strand break in the mutant allele of the ELANE gene in one or more cells,
optionally, introducing to the cells a second RNA molecule comprising a guide sequence portion capable of complexing with a CRISPR nuclease, wherein the complex of the second RNA molecule and CRISPR nuclease affects a second double strand break in the ELANE gene in the one or more cells
so as to inactivate the mutant allele of the ELANE gene in one or more cells thereby obtaining modified cells;
optionally;
(c) culture expanding the cells of step (b) wherein the modified cells are capable of engraftment and giving rise to progeny cells after engraftment; and
(d) administering to the subject the cells of step (b) or step (c)
thereby treating the SCN or CyN in the subject, or
which subject is heterozygous at one or more polymorphic sites selected from the group consisting of: rs7250194, rs397773837, rs759823713, rs12976041, rs55921706, rs2007647, rs7255385, rs351108, rs6510983, rs375312008, rs1234492733, rs8111201, rs3761010, rs11881698, rs17223066, rs74176357, rs201984870, rs141213775, rs111361200, rs3761001, rs55793725, rs55791968, rs953484068, rs56234325, rs4807932, rs9304953, rs71335273, rs868711974, and rs570466264, the method comprising
administering to the subject autologous modified cells or progeny of autologous modified cells, wherein the autologous modified cells are modified so as to have a double strand break in the mutant allele of the ELANE gene,
wherein said double strand break results from introduction to the cells of a composition comprising a CRISPR nuclease or sequence encoding the CRISPR nuclease and a first RNA molecule wherein a complex of the CRISPR nuclease and the first RNA molecule affects a double strand break in the mutant allele of the ELANE gene so as to inactive the mutant allele of the ELANE gene in the cell,
thereby treating the SCN or CyN in the subject.

41. (canceled)

42. (canceled)

43. (canceled)

44. An RNA molecule comprising a guide sequence portion having 21-30 contiguous nucleotides containing nucleotides in the sequence set forth in any one of SEQ ID NOs: 1-3751, or composition comprising the RNA and a second RNA molecule comprising a guide sequence portion, optionally wherein the guide sequence portion of the second RNA molecule has 21-30 contiguous nucleotides containing nucleotides in the sequence set forth in any of SEQ ID NOs: 2954-3751,
wherein the second RNA molecule targets a non-coding region of the ELANE gene;
wherein the nucleotide sequence of the guide sequence portion of the second RNA molecule is a different nucleotide sequence from the sequence of the guide sequence portion of the first RNA molecule,
wherein the first and/or second RNA molecule further comprises a portion having a sequence which binds to a CRISPR nuclease;
wherein the sequence which binds to a CRISPR nuclease is a tracrRNA sequence;
wherein the first and/or second RNA molecule further comprises a portion having a tracr mate sequence;
wherein the second RNA molecule further comprising one or more linker portions; and/or
wherein the first and/or second RNA molecule is up to 300 nucleotides in length; and/or
the composition further comprising one or more CRISPR nucleases or sequences encoding the one or more CRISPR nucleases, and/or one or more tracrRNA molecules or sequences encoding the one or more tracrRNA molecules.

45. (canceled)

46. (canceled)

47. (canceled)

48. (canceled)

49. (canceled)

50. (canceled)

51. (canceled)

52. (canceled)

53. (canceled)

54. A method for inactivating in a cell a mutant ELANE allele, the method comprising delivering to the cell the RNA molecule or composition of claim 44
preferably wherein the method comprises:
(a) removing an exon containing a disease-causing mutation from a mutant allele, wherein the first RNA molecule or the first and the second RNA molecules target regions flanking an entire exon or a portion of the exon;
(b) removing multiple exons, the entire open reading frame of a gene, or removing the entire gene;
(c) the first RNA molecule or the first and the second RNA molecules targeting an alternative splicing signal sequence between an exon and an intron of a mutant allele;
(d) the second RNA molecule targeting a sequence present in both a mutant allele and a functional allele;
(e) the second RNA molecule targeting an intron; or
(f) subjecting the mutant allele to insertion or deletion by an error prone non-homologous end joining (NHEJ) mechanism, generating a frameshift in the mutant allele's sequence,
optionally wherein the frameshift results in inactivation or knockout of the mutant allele
preferably wherein, the frameshift creates an early stop codon in the mutant allele or the frameshift results in nonsense-mediated mRNA decay of the transcript of the mutant allele; or
wherein the inactivating results in a truncated protein encoded by the mutant allele and a functional protein encoded by the functional allele; and/or wherein
(a) the cells or the subject is heterozygous at rs10414837 or rs3761005 and wherein the complex of the second RNA molecule and CRISPR nuclease affects a double strand break in intron 4 of the ELANE gene; or
(b) the cells or the subject is heterozygous at rs1683564 and wherein the complex of the second RNA molecule and CRISPR nuclease affects a double strand break in intron 4 of the ELANE gene; and/or
wherein the one or more CRISPR nuclease and/or the tracrRNA and the RNA molecule or RNA molecules are delivered to the subject and/or cells substantially at the same time or at different times.

55. A method for treating SCN or CyN, the method comprising delivering to a subject having SCN or CyN the RNA molecule or composition of claim 44
preferably wherein the method comprises:
(a) removing an exon containing a disease-causing mutation from a mutant allele, wherein the first RNA molecule or the first and the second RNA molecules target regions flanking an entire exon or a portion of the exon;
(b) removing multiple exons, the entire open reading frame of a gene, or removing the entire gene;
(c) the first RNA molecule or the first and the second RNA molecules targeting an alternative splicing signal sequence between an exon and an intron of a mutant allele;
(d) the second RNA molecule targeting a sequence present in both a mutant allele and a functional allele;
(e) the second RNA molecule targeting an intron; or
(f) subjecting the mutant allele to insertion or deletion by an error prone non-homologous end joining (NHEJ) mechanism, generating a frameshift in the mutant allele's sequence,
optionally wherein the frameshift results in inactivation or knockout of the mutant allele
preferably wherein, the frameshift creates an early stop codon in the mutant allele or the frameshift results in nonsense-mediated mRNA decay of the transcript of the mutant allele; or
wherein the treating results in a truncated protein encoded by the mutant allele and a functional protein encoded by the functional allele; and/or wherein
(a) the cells or the subject is heterozygous at rs10414837 or rs3761005 and wherein the complex of the second RNA molecule and CRISPR nuclease affects a double strand break in intron 4 of the ELANE gene; or
(b) the cells or the subject is heterozygous at rs1683564 and wherein the complex of the second RNA molecule and CRISPR nuclease affects a double strand break in intron 4 of the ELANE gene; and/or
wherein the one or more CRISPR nuclease and/or the tracrRNA and the RNA molecule or RNA molecules are delivered to the subject and/or cells substantially at the same time or at different times.

56. (canceled)

57. (canceled)

58. (canceled)

59. (canceled)

60. (canceled)

61. (canceled)

62. (canceled)

63. (canceled)

64. A kit for inactivating a mutant ELANE allele in a cell, comprising the RNA molecule of claim 44, a CRISPR nuclease or a sequence encoding the CRISPR nuclease, and/or a tracrRNA molecule or a sequence encoding the tracrRNA; and instructions for delivering the RNA molecule; CRISPR nuclease or a sequence encoding the CRISPR nuclease, and/or the tracrRNA molecule or a sequence encoding the tracrRNA to the cell to inactivate the mutant ELANE allele in the cell; or
a kit for treating SCN or CyN in a subject, comprising the RNA molecule claim 44, a CRISPR nuclease or a sequence encoding the CRISPR nuclease, and/or a tracrRNA molecule or a sequence encoding the tracrRNA; and instructions for delivering the RNA molecule; CRISPR nuclease or sequence encoding the CRISPR nuclease, and/or tracrRNA molecule or sequence encoding the tracrRNA to a subject having or at risk of having SCN or CyN so as to treat the SCN or CyN; or
a kit for inactivating a mutant ELANE allele in a cell, comprising the composition of claim 36, and instructions for delivering the composition to the cell so as to inactivate the ELANE gene in the cell; or
a kit for treating SCN or CyN in a subject, comprising the composition of claim 36, and instructions for delivering the composition to a subject having or at risk of having SCN or CyN so as to treat SCN or CyN.

65. (canceled)

66. (canceled)

67. (canceled)

68. The method of claim 1, wherein the CRISPR nuclease has cleavage activity when used with an RNA molecule comprising a guide sequence portion having 21-30 nucleotides, and/or
wherein the CRISPR nuclease is derived from any of Streptococcus pyogenes, Streptococcus thermophilus, Streptococcus sp., Staphylococcus aureus, Neisseria meningitidis, Treponema denticola, Nocardiopsis dassonvillei, Streptomyces pristinaespiralis, Streptomyces viridochromogenes, Streptomyces viridochromogenes, Streptosporangium roseum, Streptosporangium roseum, Alicyclobacillus acidocaldarius, Bacillus pseudomycoides, Bacillus selenitireducens, Exiguobacterium sibiricum, Lactobacillus delbrueckii, Lactobacillus salivarius, Microscilla marina, Burkholderiales bacterium, Polaromonas naphthalenivorans, Polaromonas sp., Crocosphaera watsonii, Cyanothece sp., Microcystis aeruginosa, Synechococcus sp., Acetohalobium arabaticum, Ammonifex degensii, Caldicelulosiruptor becscii, Candidatus Desulforudis, Clostridium botulinum, Clostridium difficile, Finegoldia magna, Natranaerobius thermophilus, Pelotomaculum thermopropionicum, Acidithiobacillus caldus, Acidithiobacillus ferrooxidans, Allochromatium vinosum, Marinobacter sp., Nitrosococcus halophilus, Nitrosococcus watsoni, Pseudoalteromonas haloplanktis, Ktedonobacter racemifer, Methanohalobium evestigatum, Anabaena variabilis, Nodularia spumigena, Nostoc sp., Arthrospira maxima, Arthrospira platensis, Arthrospira sp., Lyngbya sp., Microcoleus chthonoplastes, Oscillatoria sp., Petrotoga mobilis, Thermosipho africanus, Acaryochloris marina, Francisella cf. novicida Fx1, Alicyclobacillus acidoterrestris, Oleiphilus sp., Bacterium CGO9_39_24, and Deltaproteobacteria bacterium; and/or
wherein the CRISPR nuclease has one or more of the following features:
(a) greater cleavage activity when used with an RNA molecule comprising a guide sequence portion having 21-23 nucleotides, compared to its cleavage activity when used with an RNA molecule comprising a guide sequence portion having 20 or fewer nucleotides, and/or 24 or more nucleotides;
(b) greater cleavage activity when used with an RNA molecule comprising a guide sequence portion having 21-22 nucleotides, compared to its cleavage activity when used with an RNA molecule comprising a guide sequence portion having 20 or fewer nucleotides, and/or 23 or more nucleotides; and
(c) greatest cleavage activity when used with an RNA molecule comprising a guide sequence portion having 22 nucleotides; and/or
wherein the CRISPR nuclease has at least 95% identity to the amino acid sequence as set forth in SEQ ID NO:3789 or the sequence encoding the CRISPR nuclease has at least a 95% sequence identity to SEQ ID NO:3790 or SEQ ID NO:3791; and/or
wherein the composition comprising the CRISPR nuclease has one or more of the following features:
(a) the composition is in an aqueous solution;
(b) the pH of the composition is between 6 and 8;
(c) the composition is free of RNase; and/or
wherein the first RNA molecule comprises a guide sequence portion having 21-22 nucleotides.

69. (canceled)

70. (canceled)

71. (canceled)

72. (canceled)

73. (canceled)

74. The RNA molecule of claim 44, wherein the guide sequence portion has 21-22 contiguous nucleotides in a sequence set forth in any one of SEQ ID NOs: 1-3751.

The application's sequence listing, which the Patent Office published only in electronic form, follows.

SEQUENCE LISTING (3835 sequences)

SEQ ID NO: 1 - RNA, 21 nt, Artificial Sequence
  Synthetic sequence
aacuccugcccugccuacccc

SEQ ID NO: 2 - RNA, 21 nt, Artificial Sequence
  Synthetic sequence
accagggaacuccugcccugc

SEQ ID NO: 3 - RNA, 21 nt, Artificial Sequence
  Synthetic sequence
aggagggguaggcagggcagg

SEQ ID NO: 4 - RNA, 21 nt, Artificial Sequence
  Synthetic sequence
aggaguucccugguagaagca

SEQ ID NO: 5 - RNA, 21 nt, Artificial Sequence
  Synthetic sequence
aggcagggcaggaguucccug

SEQ ID NO: 6 - RNA, 21 nt, Artificial Sequence
  Synthetic sequence
agggaacuccugcccugccua

SEQ ID NO: 7 - RNA, 21 nt, Artificial Sequence
  Synthetic sequence
agggcaggaguucccugguag

SEQ ID NO: 8 - RNA, 21 nt, Artificial Sequence
  Synthetic sequence
agggguaggcagggcaggagu

SEQ ID NO: 9 - RNA, 21 nt, Artificial Sequence
  Synthetic sequence
aguucccugguagaagcauga

SEQ ID NO: 10 - RNA, 21 nt, Artificial Sequence
  Synthetic sequence
augcuucuaccagggaacucc

SEQ ID NO: 11 - RNA, 21 nt, Artificial Sequence
  Synthetic sequence
auugcucaugcuucuaccagg

SEQ ID NO: 12 - RNA, 21 nt, Artificial Sequence
  Synthetic sequence
caggaguucccugguagaagc

SEQ ID NO: 13 - RNA, 21 nt, Artificial Sequence
  Synthetic sequence
cagggaacuccugcccugccu

SEQ ID NO: 14 - RNA, 21 nt, Artificial Sequence
  Synthetic sequence
cagggcaggaguucccuggua

SEQ ID NO: 15 - RNA, 21 nt, Artificial Sequence
  Synthetic sequence
caugcuucuaccagggaacuc

SEQ ID NO: 16 - RNA, 21 nt, Artificial Sequence
  Synthetic sequence
cauugcucaugcuucuaccag

SEQ ID NO: 17 - RNA, 21 nt, Artificial Sequence
  Synthetic sequence
ccagggaacuccugcccugcc

SEQ ID NO: 18 - RNA, 21 nt, Artificial Sequence
  Synthetic sequence
cuaccagggaacuccugcccu

SEQ ID NO: 19 - RNA, 21 nt, Artificial Sequence
  Synthetic sequence
cucaugcuucuaccagggaac

SEQ ID NO: 20 - RNA, 21 nt, Artificial Sequence
  Synthetic sequence
cuucuaccagggaacuccugc

SEQ ID NO: 21 - RNA, 21 nt, Artificial Sequence
  Synthetic sequence
gaacuccugcccugccuaccc

SEQ ID NO: 22 - RNA, 21 nt, Artificial Sequence
  Synthetic sequence
gagggguaggcagggcaggag

SEQ ID NO: 23 - RNA, 21 nt, Artificial Sequence
  Synthetic sequence
gaguucccugguagaagcaug

SEQ ID NO: 24 - RNA, 21 nt, Artificial Sequence
  Synthetic sequence
gcaggaguucccugguagaag

SEQ ID NO: 25 - RNA, 21 nt, Artificial Sequence
  Synthetic sequence
gcagggcaggaguucccuggu

SEQ ID NO: 26 - RNA, 21 nt, Artificial Sequence
  Synthetic sequence
gcucaugcuucuaccagggaa

SEQ ID NO: 27 - RNA, 21 nt, Artificial Sequence
  Synthetic sequence
gcuucuaccagggaacuccug

SEQ ID NO: 28 - RNA, 21 nt, Artificial Sequence
  Synthetic sequence
ggaacuccugcccugccuacc

SEQ ID NO: 29 - RNA, 21 nt, Artificial Sequence
  Synthetic sequence
ggagggguaggcagggcagga

SEQ ID NO: 30 - RNA, 21 nt, Artificial Sequence
  Synthetic sequence
ggaguucccugguagaagcau

SEQ ID NO: 31 - RNA, 21 nt, Artificial Sequence
  Synthetic sequence
ggcaggaguucccugguagaa

SEQ ID NO: 32 - RNA, 21 nt, Artificial Sequence
  Synthetic sequence
ggcagggcaggaguucccugg

SEQ ID NO: 33 - RNA, 21 nt, Artificial Sequence
  Synthetic sequence
gggaacuccugcccugccuac

SEQ ID NO: 34 - RNA, 21 nt, Artificial Sequence
  Synthetic sequence
gggcaggaguucccugguaga

SEQ ID NO: 35 - RNA, 21 nt, Artificial Sequence
  Synthetic sequence
gggguaggcagggcaggaguu

SEQ ID NO: 36 - RNA, 21 nt, Artificial Sequence
  Synthetic sequence
ggguaggcagggcaggaguuc

SEQ ID NO: 37 - RNA, 21 nt, Artificial Sequence
  Synthetic sequence
gguaggcagggcaggaguucc

SEQ ID NO: 38 - RNA, 21 nt, Artificial Sequence
  Synthetic sequence
guaggcagggcaggaguuccc

SEQ ID NO: 39 - RNA, 21 nt, Artificial Sequence
  Synthetic sequence
guucccugguagaagcaugag

SEQ ID NO: 40 - RNA, 21 nt, Artificial Sequence
  Synthetic sequence
uaccagggaacuccugcccug

SEQ ID NO: 41 - RNA, 21 nt, Artificial Sequence
  Synthetic sequence
uaggagggguaggcagggcag

SEQ ID NO: 42 - RNA, 21 nt, Artificial Sequence
  Synthetic sequence
uaggcagggcaggaguucccu

SEQ ID NO: 43 - RNA, 21 nt, Artificial Sequence
  Synthetic sequence
ucaugcuucuaccagggaacu

SEQ ID NO: 44 - RNA, 21 nt, Artificial Sequence
  Synthetic sequence
ucuaccagggaacuccugccc

SEQ ID NO: 45 - RNA, 21 nt, Artificial Sequence
  Synthetic sequence
ugcucaugcuucuaccaggga

SEQ ID NO: 46 - RNA, 21 nt, Artificial Sequence
  Synthetic sequence
ugcuucuaccagggaacuccu

SEQ ID NO: 47 - RNA, 21 nt, Artificial Sequence
  Synthetic sequence
uucuaccagggaacuccugcc

SEQ ID NO: 48 - RNA, 21 nt, Artificial Sequence
  Synthetic sequence
uugcucaugcuucuaccaggg

SEQ ID NO: 49 - RNA, 22 nt, Artificial Sequence
  Synthetic sequence
aacuccugcccugccuaccccu

SEQ ID NO: 50 - RNA, 22 nt, Artificial Sequence
  Synthetic sequence
accagggaacuccugcccugcc

SEQ ID NO: 51 - RNA, 22 nt, Artificial Sequence
  Synthetic sequence
aggagggguaggcagggcagga

SEQ ID NO: 52 - RNA, 22 nt, Artificial Sequence
  Synthetic sequence
aggaguucccugguagaagcau

SEQ ID NO: 53 - RNA, 22 nt, Artificial Sequence
  Synthetic sequence
aggcagggcaggaguucccugg

SEQ ID NO: 54 - RNA, 22 nt, Artificial Sequence
  Synthetic sequence
agggaacuccugcccugccuac

SEQ ID NO: 55 - RNA, 22 nt, Artificial Sequence
  Synthetic sequence
agggcaggaguucccugguaga

SEQ ID NO: 56 - RNA, 22 nt, Artificial Sequence
  Synthetic sequence
agggguaggcagggcaggaguu

SEQ ID NO: 57 - RNA, 22 nt, Artificial Sequence
  Synthetic sequence
aguucccugguagaagcaugag

SEQ ID NO: 58 - RNA, 22 nt, Artificial Sequence
  Synthetic sequence
augcuucuaccagggaacuccu

SEQ ID NO: 59 - RNA, 22 nt, Artificial Sequence
  Synthetic sequence
auugcucaugcuucuaccaggg

SEQ ID NO: 60 - RNA, 22 nt, Artificial Sequence
  Synthetic sequence
caggaguucccugguagaagca

SEQ ID NO: 61 - RNA, 22 nt, Artificial Sequence
  Synthetic sequence
cagggaacuccugcccugccua

SEQ ID NO: 62 - RNA, 22 nt, Artificial Sequence
  Synthetic sequence
cagggcaggaguucccugguag

SEQ ID NO: 63 - RNA, 22 nt, Artificial Sequence
  Synthetic sequence
caugcuucuaccagggaacucc

SEQ ID NO: 64 - RNA, 22 nt, Artificial Sequence
  Synthetic sequence
cauugcucaugcuucuaccagg

SEQ ID NO: 65 - RNA, 22 nt, Artificial Sequence
  Synthetic sequence
ccagggaacuccugcccugccu

SEQ ID NO: 66 - RNA, 22 nt, Artificial Sequence
  Synthetic sequence
cuaccagggaacuccugcccug

SEQ ID NO: 67 - RNA, 22 nt, Artificial Sequence
  Synthetic sequence
cucaugcuucuaccagggaacu

SEQ ID NO: 68 - RNA, 22 nt, Artificial Sequence
  Synthetic sequence
cuucuaccagggaacuccugcc

SEQ ID NO: 69 - RNA, 22 nt, Artificial Sequence
  Synthetic sequence
gaacuccugcccugccuacccc

SEQ ID NO: 70 - RNA, 22 nt, Artificial Sequence
  Synthetic sequence
gagggguaggcagggcaggagu

SEQ ID NO: 71 - RNA, 22 nt, Artificial Sequence
  Synthetic sequence
gaguucccugguagaagcauga

SEQ ID NO: 72 - RNA, 22 nt, Artificial Sequence
  Synthetic sequence
gcaggaguucccugguagaagc

SEQ ID NO: 73 - RNA, 22 nt, Artificial Sequence
  Synthetic sequence
gcagggcaggaguucccuggua

SEQ ID NO: 74 - RNA, 22 nt, Artificial Sequence
  Synthetic sequence
gcucaugcuucuaccagggaac

SEQ ID NO: 75 - RNA, 22 nt, Artificial Sequence
  Synthetic sequence
gcuucuaccagggaacuccugc

SEQ ID NO: 76 - RNA, 22 nt, Artificial Sequence
  Synthetic sequence
ggaacuccugcccugccuaccc

SEQ ID NO: 77 - RNA, 22 nt, Artificial Sequence
  Synthetic sequence
ggagggguaggcagggcaggag

SEQ ID NO: 78 - RNA, 22 nt, Artificial Sequence
  Synthetic sequence
ggaguucccugguagaagcaug

SEQ ID NO: 79 - RNA, 22 nt, Artificial Sequence
  Synthetic sequence
ggcaggaguucccugguagaag

SEQ ID NO: 80 - RNA, 22 nt, Artificial Sequence
  Synthetic sequence
ggcagggcaggaguucccuggu

SEQ ID NO: 81 - RNA, 22 nt, Artificial Sequence
  Synthetic sequence
gggaacuccugcccugccuacc

SEQ ID NO: 82 - RNA, 22 nt, Artificial Sequence
  Synthetic sequence
gggcaggaguucccugguagaa

SEQ ID NO: 83 - RNA, 22 nt, Artificial Sequence
  Synthetic sequence
gggguaggcagggcaggaguuc

SEQ ID NO: 84 - RNA, 22 nt, Artificial Sequence
  Synthetic sequence
ggguaggcagggcaggaguucc

SEQ ID NO: 85 - RNA, 22 nt, Artificial Sequence
  Synthetic sequence
gguaggcagggcaggaguuccc

SEQ ID NO: 86 - RNA, 22 nt, Artificial Sequence
  Synthetic sequence
guaggagggguaggcagggcag

SEQ ID NO: 87 - RNA, 22 nt, Artificial Sequence
  Synthetic sequence
guaggcagggcaggaguucccu

SEQ ID NO: 88 - RNA, 22 nt, Artificial Sequence
  Synthetic sequence
guucccugguagaagcaugagc

SEQ ID NO: 89 - RNA, 22 nt, Artificial Sequence
  Synthetic sequence
uaccagggaacuccugcccugc

SEQ ID NO: 90 - RNA, 22 nt, Artificial Sequence
  Synthetic sequence
uaggagggguaggcagggcagg

SEQ ID NO: 91 - RNA, 22 nt, Artificial Sequence
  Synthetic sequence
uaggcagggcaggaguucccug

SEQ ID NO: 92 - RNA, 22 nt, Artificial Sequence
  Synthetic sequence
ucaugcuucuaccagggaacuc

SEQ ID NO: 93 - RNA, 22 nt, Artificial Sequence
  Synthetic sequence
ucauugcucaugcuucuaccag

SEQ ID NO: 94 - RNA, 22 nt, Artificial Sequence
  Synthetic sequence
ucuaccagggaacuccugcccu

SEQ ID NO: 95 - RNA, 22 nt, Artificial Sequence
  Synthetic sequence
ugcucaugcuucuaccagggaa

SEQ ID NO: 96 - RNA, 22 nt, Artificial Sequence
  Synthetic sequence
ugcuucuaccagggaacuccug

SEQ ID NO: 97 - RNA, 22 nt, Artificial Sequence
  Synthetic sequence
uucuaccagggaacuccugccc

SEQ ID NO: 98 - RNA, 22 nt, Artificial Sequence
  Synthetic sequence
uugcucaugcuucuaccaggga

SEQ ID NO: 99 - RNA, 21 nt, Artificial Sequence
  Synthetic sequence
accagggagcuccugcccugc

SEQ ID NO: 100 - RNA, 21 nt, Artificial Sequence
  Synthetic sequence
agcucccugguagaagcauga

SEQ ID NO: 101 - RNA, 21 nt, Artificial Sequence
  Synthetic sequence
agcuccugcccugccuacccc

SEQ ID NO: 102 - RNA, 21 nt, Artificial Sequence
  Synthetic sequence
aggagcucccugguagaagca

SEQ ID NO: 103 - RNA, 21 nt, Artificial Sequence
  Synthetic sequence
aggcagggcaggagcucccug

SEQ ID NO: 104 - RNA, 21 nt, Artificial Sequence
  Synthetic sequence
agggagcuccugcccugccua

SEQ ID NO: 105 - RNA, 21 nt, Artificial Sequence
  Synthetic sequence
agggcaggagcucccugguag

SEQ ID NO: 106 - RNA, 21 nt, Artificial Sequence
  Synthetic sequence
agggguaggcagggcaggagc

SEQ ID NO: 107 - RNA, 21 nt, Artificial Sequence
  Synthetic sequence
augcuucuaccagggagcucc

SEQ ID NO: 108 - RNA, 21 nt, Artificial Sequence
  Synthetic sequence
caggagcucccugguagaagc

SEQ ID NO: 109 - RNA, 21 nt, Artificial Sequence
  Synthetic sequence
cagggagcuccugcccugccu

SEQ ID NO: 110 - RNA, 21 nt, Artificial Sequence
  Synthetic sequence
cagggcaggagcucccuggua

SEQ ID NO: 111 - RNA, 21 nt, Artificial Sequence
  Synthetic sequence
caugcuucuaccagggagcuc

SEQ ID NO: 112 - RNA, 21 nt, Artificial Sequence
  Synthetic sequence
ccagggagcuccugcccugcc

SEQ ID NO: 113 - RNA, 21 nt, Artificial Sequence
  Synthetic sequence
cuaccagggagcuccugcccu

SEQ ID NO: 114 - RNA, 21 nt, Artificial Sequence
  Synthetic sequence
cucaugcuucuaccagggagc

SEQ ID NO: 115 - RNA, 21 nt, Artificial Sequence
  Synthetic sequence
cuucuaccagggagcuccugc

SEQ ID NO: 116 - RNA, 21 nt, Artificial Sequence
  Synthetic sequence
gagcucccugguagaagcaug

SEQ ID NO: 117 - RNA, 21 nt, Artificial Sequence
  Synthetic sequence
gagcuccugcccugccuaccc

SEQ ID NO: 118 - RNA, 21 nt, Artificial Sequence
  Synthetic sequence
gcaggagcucccugguagaag

SEQ ID NO: 119 - RNA, 21 nt, Artificial Sequence
  Synthetic sequence
gcagggcaggagcucccuggu

SEQ ID NO: 120 - RNA, 21 nt, Artificial Sequence
  Synthetic sequence
gcucaugcuucuaccagggag

SEQ ID NO: 121 - RNA, 21 nt, Artificial Sequence
  Synthetic sequence
gcucccugguagaagcaugag

SEQ ID NO: 122 - RNA, 21 nt, Artificial Sequence
  Synthetic sequence
gcuucuaccagggagcuccug

SEQ ID NO: 123 - RNA, 21 nt, Artificial Sequence
  Synthetic sequence
ggagcucccugguagaagcau

SEQ ID NO: 124 - RNA, 21 nt, Artificial Sequence
  Synthetic sequence
ggagcuccugcccugccuacc

SEQ ID NO: 125 - RNA, 21 nt, Artificial Sequence
  Synthetic sequence
ggcaggagcucccugguagaa

SEQ ID NO: 126 - RNA, 21 nt, Artificial Sequence
  Synthetic sequence
ggcagggcaggagcucccugg

SEQ ID NO: 127 - RNA, 21 nt, Artificial Sequence
  Synthetic sequence
gggagcuccugcccugccuac

SEQ ID NO: 128 - RNA, 21 nt, Artificial Sequence
  Synthetic sequence
gggcaggagcucccugguaga

SEQ ID NO: 129 - RNA, 21 nt, Artificial Sequence
  Synthetic sequence
gggguaggcagggcaggagcu

SEQ ID NO: 130 - RNA, 21 nt, Artificial Sequence
  Synthetic sequence
ggguaggcagggcaggagcuc

SEQ ID NO: 131 - RNA, 21 nt, Artificial Sequence
  Synthetic sequence
gguaggcagggcaggagcucc

SEQ ID NO: 132 - RNA, 21 nt, Artificial Sequence
  Synthetic sequence
guaggcagggcaggagcuccc

SEQ ID NO: 133 - RNA, 21 nt, Artificial Sequence
  Synthetic sequence
uaccagggagcuccugcccug

SEQ ID NO: 134 - RNA, 21 nt, Artificial Sequence
  Synthetic sequence
uaggcagggcaggagcucccu

SEQ ID NO: 135 - RNA, 21 nt, Artificial Sequence
  Synthetic sequence
ucaugcuucuaccagggagcu

SEQ ID NO: 136 - RNA, 21 nt, Artificial Sequence
  Synthetic sequence
ucuaccagggagcuccugccc

SEQ ID NO: 137 - RNA, 21 nt, Artificial Sequence
  Synthetic sequence
ugcuucuaccagggagcuccu

SEQ ID NO: 138 - RNA, 21 nt, Artificial Sequence
  Synthetic sequence
uucuaccagggagcuccugcc

SEQ ID NO: 139 - RNA, 22 nt, Artificial Sequence
  Synthetic sequence
accagggagcuccugcccugcc

SEQ ID NO: 140 - RNA, 22 nt, Artificial Sequence
  Synthetic sequence
agcucccugguagaagcaugag

SEQ ID NO: 141 - RNA, 22 nt, Artificial Sequence
  Synthetic sequence
agcuccugcccugccuaccccu

SEQ ID NO: 142 - RNA, 22 nt, Artificial Sequence
  Synthetic sequence
aggagcucccugguagaagcau

SEQ ID NO: 143 - RNA, 22 nt, Artificial Sequence
  Synthetic sequence
aggcagggcaggagcucccugg

SEQ ID NO: 144 - RNA, 22 nt, Artificial Sequence
  Synthetic sequence
agggagcuccugcccugccuac

SEQ ID NO: 145 - RNA, 22 nt, Artificial Sequence
  Synthetic sequence
agggcaggagcucccugguaga

SEQ ID NO: 146 - RNA, 22 nt, Artificial Sequence
  Synthetic sequence
agggguaggcagggcaggagcu

SEQ ID NO: 147 - RNA, 22 nt, Artificial Sequence
  Synthetic sequence
augcuucuaccagggagcuccu

SEQ ID NO: 148 - RNA, 22 nt, Artificial Sequence
  Synthetic sequence
caggagcucccugguagaagca

SEQ ID NO: 149 - RNA, 22 nt, Artificial Sequence
  Synthetic sequence
cagggagcuccugcccugccua

SEQ ID NO: 150 - RNA, 22 nt, Artificial Sequence
  Synthetic sequence
cagggcaggagcucccugguag

SEQ ID NO: 151 - RNA, 22 nt, Artificial Sequence
  Synthetic sequence
caugcuucuaccagggagcucc

SEQ ID NO: 152 - RNA, 22 nt, Artificial Sequence
  Synthetic sequence
ccagggagcuccugcccugccu

SEQ ID NO: 153 - RNA, 22 nt, Artificial Sequence
  Synthetic sequence
cuaccagggagcuccugcccug

SEQ ID NO: 154 - RNA, 22 nt, Artificial Sequence
  Synthetic sequence
cucaugcuucuaccagggagcu

SEQ ID NO: 155 - RNA, 22 nt, Artificial Sequence
  Synthetic sequence
cuucuaccagggagcuccugcc

SEQ ID NO: 156 - RNA, 22 nt, Artificial Sequence
  Synthetic sequence
gagcucccugguagaagcauga

SEQ ID NO: 157 - RNA, 22 nt, Artificial Sequence
  Synthetic sequence
gagcuccugcccugccuacccc

SEQ ID NO: 158 - RNA, 22 nt, Artificial Sequence
  Synthetic sequence
gagggguaggcagggcaggagc

SEQ ID NO: 159 - RNA, 22 nt, Artificial Sequence
  Synthetic sequence
gcaggagcucccugguagaagc

SEQ ID NO: 160 - RNA, 22 nt, Artificial Sequence
  Synthetic sequence
gcagggcaggagcucccuggua

SEQ ID NO: 161 - RNA, 22 nt, Artificial Sequence
  Synthetic sequence
gcucaugcuucuaccagggagc

SEQ ID NO: 162 - RNA, 22 nt, Artificial Sequence
  Synthetic sequence
gcucccugguagaagcaugagc

SEQ ID NO: 163 - RNA, 22 nt, Artificial Sequence
  Synthetic sequence
gcuucuaccagggagcuccugc

SEQ ID NO: 164 - RNA, 22 nt, Artificial Sequence
  Synthetic sequence
ggagcucccugguagaagcaug

SEQ ID NO: 165 - RNA, 22 nt, Artificial Sequence
  Synthetic sequence
ggagcuccugcccugccuaccc

SEQ ID NO: 166 - RNA, 22 nt, Artificial Sequence
  Synthetic sequence
ggcaggagcucccugguagaag

SEQ ID NO: 167 - RNA, 22 nt, Artificial Sequence
  Synthetic sequence
ggcagggcaggagcucccuggu

SEQ ID NO: 168 - RNA, 22 nt, Artificial Sequence
  Synthetic sequence
gggagcuccugcccugccuacc

SEQ ID NO: 169 - RNA, 22 nt, Artificial Sequence
  Synthetic sequence
gggcaggagcucccugguagaa

SEQ ID NO: 170 - RNA, 22 nt, Artificial Sequence
  Synthetic sequence
gggguaggcagggcaggagcuc

SEQ ID NO: 171 - RNA, 22 nt, Artificial Sequence
  Synthetic sequence
ggguaggcagggcaggagcucc

SEQ ID NO: 172 - RNA, 22 nt, Artificial Sequence
  Synthetic sequence
gguaggcagggcaggagcuccc

SEQ ID NO: 173 - RNA, 22 nt, Artificial Sequence
  Synthetic sequence
guaggcagggcaggagcucccu

SEQ ID NO: 174 - RNA, 22 nt, Artificial Sequence
  Synthetic sequence
uaccagggagcuccugcccugc

SEQ ID NO: 175 - RNA, 22 nt, Artificial Sequence
  Synthetic sequence
uaggcagggcaggagcucccug

SEQ ID NO: 176 - RNA, 22 nt, Artificial Sequence
  Synthetic sequence
ucaugcuucuaccagggagcuc

SEQ ID NO: 177 - RNA, 22 nt, Artificial Sequence
  Synthetic sequence
ucuaccagggagcuccugcccu

SEQ ID NO: 178 - RNA, 22 nt, Artificial Sequence
  Synthetic sequence
ugcucaugcuucuaccagggag

SEQ ID NO: 179 - RNA, 22 nt, Artificial Sequence
  Synthetic sequence
ugcuucuaccagggagcuccug

SEQ ID NO: 180 - RNA, 22 nt, Artificial Sequence
  Synthetic sequence
uucuaccagggagcuccugccc

SEQ ID NO: 181 - RNA, 22 nt, Artificial Sequence
  Synthetic sequence
acugggcgugguggucugugcc

SEQ ID NO: 182 - RNA, 21 nt, Artificial Sequence
  Synthetic sequence
accacaggcacagaccaccac

SEQ ID NO: 183 - RNA, 21 nt, Artificial Sequence
  Synthetic sequence
ccacaggcacagaccaccacg

SEQ ID NO: 184 - RNA, 21 nt, Artificial Sequence
  Synthetic sequence
gggcgugguggucugugccug

SEQ ID NO: 185 - RNA, 21 nt, Artificial Sequence
  Synthetic sequence
ugggcgugguggucugugccu

SEQ ID NO: 186 - RNA, 22 nt, Artificial Sequence
  Synthetic sequence
accacaggcacagaccaccacg

SEQ ID NO: 187 - RNA, 22 nt, Artificial Sequence
  Synthetic sequence
ccacaggcacagaccaccacgc

SEQ ID NO: 188 - RNA, 22 nt, Artificial Sequence
  Synthetic sequence
cggaguagcugggaccacaggc

SEQ ID NO: 189 - RNA, 22 nt, Artificial Sequence
  Synthetic sequence
cugggcgugguggucugugccu

SEQ ID NO: 190 - RNA, 22 nt, Artificial Sequence
  Synthetic sequence
cugugccuguggucccagcuac

SEQ ID NO: 191 - RNA, 22 nt, Artificial Sequence
  Synthetic sequence
gaccacaggcacagaccaccac

SEQ ID NO: 192 - RNA, 22 nt, Artificial Sequence
  Synthetic sequence
ggaguagcugggaccacaggca

SEQ ID NO: 193 - RNA, 22 nt, Artificial Sequence
  Synthetic sequence
gggcgugguggucugugccugu

SEQ ID NO: 194 - RNA, 22 nt, Artificial Sequence
  Synthetic sequence
ucugugccuguggucccagcua

SEQ ID NO: 195 - RNA, 22 nt, Artificial Sequence
  Synthetic sequence
ugggcgugguggucugugccug

SEQ ID NO: 196 - RNA, 21 nt, Artificial Sequence
  Synthetic sequence
acacccgcugugaccauaaca

SEQ ID NO: 197 - RNA, 21 nt, Artificial Sequence
  Synthetic sequence
acagcggguguagacuccgag

SEQ ID NO: 198 - RNA, 21 nt, Artificial Sequence
  Synthetic sequence
acccgcugugaccauaacacc

SEQ ID NO: 199 - RNA, 21 nt, Artificial Sequence
  Synthetic sequence
acgucccccucggagucuaca

SEQ ID NO: 200 - RNA, 21 nt, Artificial Sequence
  Synthetic sequence
agcggguguagacuccgaggg

SEQ ID NO: 201 - RNA, 21 nt, Artificial Sequence
  Synthetic sequence
agggguguuauggucacagcg

SEQ ID NO: 202 - RNA, 21 nt, Artificial Sequence
  Synthetic sequence
agguagggguguuauggucac

SEQ ID NO: 203 - RNA, 21 nt, Artificial Sequence
  Synthetic sequence
agucuacacccgcugugacca

SEQ ID NO: 204 - RNA, 21 nt, Artificial Sequence
  Synthetic sequence
auggucacagcggguguagac

SEQ ID NO: 205 - RNA, 21 nt, Artificial Sequence
  Synthetic sequence
cacagcggguguagacuccga

SEQ ID NO: 206 - RNA, 21 nt, Artificial Sequence
  Synthetic sequence
cacccgcugugaccauaacac

SEQ ID NO: 207 - RNA, 21 nt, Artificial Sequence
  Synthetic sequence
cacgucccccucggagucuac

SEQ ID NO: 208 - RNA, 21 nt, Artificial Sequence
  Synthetic sequence
cagcggguguagacuccgagg

SEQ ID NO: 209 - RNA, 21 nt, Artificial Sequence
  Synthetic sequence
cccccucggagucuacacccg

SEQ ID NO: 210 - RNA, 21 nt, Artificial Sequence
  Synthetic sequence
ccccucggagucuacacccgc

SEQ ID NO: 211 - RNA, 21 nt, Artificial Sequence
  Synthetic sequence
cccgcugugaccauaacaccc

SEQ ID NO: 212 - RNA, 21 nt, Artificial Sequence
  Synthetic sequence
cccucggagucuacacccgcu

SEQ ID NO: 213 - RNA, 21 nt, Artificial Sequence
  Synthetic sequence
ccgcugugaccauaacacccc

SEQ ID NO: 214 - RNA, 21 nt, Artificial Sequence
  Synthetic sequence
ccucggagucuacacccgcug

SEQ ID NO: 215 - RNA, 21 nt, Artificial Sequence
  Synthetic sequence
cggagucuacacccgcuguga

SEQ ID NO: 216 - RNA, 21 nt, Artificial Sequence
  Synthetic sequence
cggguguagacuccgaggggg

SEQ ID NO: 217 - RNA, 21 nt, Artificial Sequence
  Synthetic sequence
cgucccccucggagucuacac

SEQ ID NO: 218 - RNA, 21 nt, Artificial Sequence
  Synthetic sequence
cuacacccgcugugaccauaa

SEQ ID NO: 219 - RNA, 21 nt, Artificial Sequence
  Synthetic sequence
cucggagucuacacccgcugu

SEQ ID NO: 220 - RNA, 21 nt, Artificial Sequence
  Synthetic sequence
gagucuacacccgcugugacc

SEQ ID NO: 221 - RNA, 21 nt, Artificial Sequence
  Synthetic sequence
gcggguguagacuccgagggg

SEQ ID NO: 222 - RNA, 21 nt, Artificial Sequence
  Synthetic sequence
ggagucuacacccgcugugac

SEQ ID NO: 223 - RNA, 21 nt, Artificial Sequence
  Synthetic sequence
gggguguuauggucacagcgg

SEQ ID NO: 224 - RNA, 21 nt, Artificial Sequence
  Synthetic sequence
ggguguuauggucacagcggg

SEQ ID NO: 225 - RNA, 21 nt, Artificial Sequence
  Synthetic sequence
gguagggguguuauggucaca

SEQ ID NO: 226 - RNA, 21 nt, Artificial Sequence
  Synthetic sequence
ggucacagcggguguagacuc

SEQ ID NO: 227 - RNA, 21 nt, Artificial Sequence
  Synthetic sequence
gguguuauggucacagcgggu

SEQ ID NO: 228 - RNA, 21 nt, Artificial Sequence
  Synthetic sequence
guagggguguuauggucacag

SEQ ID NO: 229 - RNA, 21 nt, Artificial Sequence
  Synthetic sequence
gucacagcggguguagacucc

SEQ ID NO: 230 - RNA, 21 nt, Artificial Sequence
  Synthetic sequence
gucccccucggagucuacacc

SEQ ID NO: 231 - RNA, 21 nt, Artificial Sequence
  Synthetic sequence
gucuacacccgcugugaccau

SEQ ID NO: 232 - RNA, 21 nt, Artificial Sequence
  Synthetic sequence
guguuauggucacagcgggug

SEQ ID NO: 233 - RNA, 21 nt, Artificial Sequence
  Synthetic sequence
guuauggucacagcgggugua

SEQ ID NO: 234 - RNA, 21 nt, Artificial Sequence
  Synthetic sequence
uacacccgcugugaccauaac

SEQ ID NO: 235 - RNA, 21 nt, Artificial Sequence
  Synthetic sequence
uagggguguuauggucacagc

SEQ ID NO: 236 - RNA, 21 nt, Artificial Sequence
  Synthetic sequence
uauggucacagcggguguaga

SEQ ID NO: 237 - RNA, 21 nt, Artificial Sequence
  Synthetic sequence
ucacagcggguguagacuccg

SEQ ID NO: 238 - RNA, 21 nt, Artificial Sequence
  Synthetic sequence
ucccccucggagucuacaccc

SEQ ID NO: 239 - RNA, 21 nt, Artificial Sequence
  Synthetic sequence
ucggagucuacacccgcugug

SEQ ID NO: 240 - RNA, 21 nt, Artificial Sequence
  Synthetic sequence
ucuacacccgcugugaccaua

SEQ ID NO: 241 - RNA, 21 nt, Artificial Sequence
  Synthetic sequence
uggucacagcggguguagacu

SEQ ID NO: 242 - RNA, 21 nt, Artificial Sequence
  Synthetic sequence
uguuauggucacagcgggugu

SEQ ID NO: 243 - RNA, 21 nt, Artificial Sequence
  Synthetic sequence
uuauggucacagcggguguag

SEQ ID NO: 244 - RNA, 22 nt, Artificial Sequence
  Synthetic sequence
aagguagggguguuauggucac

SEQ ID NO: 245 - RNA, 22 nt, Artificial Sequence
  Synthetic sequence
acacccgcugugaccauaacac

SEQ ID NO: 246 - RNA, 22 nt, Artificial Sequence
  Synthetic sequence
acagcggguguagacuccgagg

SEQ ID NO: 247 - RNA, 22 nt, Artificial Sequence
  Synthetic sequence
acccgcugugaccauaacaccc

SEQ ID NO: 248 - RNA, 22 nt, Artificial Sequence
  Synthetic sequence
acgucccccucggagucuacac

SEQ ID NO: 249 - RNA, 22 nt, Artificial Sequence
  Synthetic sequence
agcggguguagacuccgagggg

SEQ ID NO: 250 - RNA, 22 nt, Artificial Sequence
  Synthetic sequence
agggguguuauggucacagcgg

SEQ ID NO: 251 - RNA, 22 nt, Artificial Sequence
  Synthetic sequence
agguagggguguuauggucaca

SEQ ID NO: 252 - RNA, 22 nt, Artificial Sequence
  Synthetic sequence
agucuacacccgcugugaccau

SEQ ID NO: 253 - RNA, 22 nt, Artificial Sequence
  Synthetic sequence
auggucacagcggguguagacu

SEQ ID NO: 254 - RNA, 22 nt, Artificial Sequence
  Synthetic sequence
cacagcggguguagacuccgag

SEQ ID NO: 255 - RNA, 22 nt, Artificial Sequence
  Synthetic sequence
cacccgcugugaccauaacacc

SEQ ID NO: 256 - RNA, 22 nt, Artificial Sequence
  Synthetic sequence
cacgucccccucggagucuaca

SEQ ID NO: 257 - RNA, 22 nt, Artificial Sequence
  Synthetic sequence
cagcggguguagacuccgaggg

SEQ ID NO: 258 - RNA, 22 nt, Artificial Sequence
  Synthetic sequence
ccacgucccccucggagucuac

SEQ ID NO: 259 - RNA, 22 nt, Artificial Sequence
  Synthetic sequence
cccccucggagucuacacccgc

SEQ ID NO: 260 - RNA, 22 nt, Artificial Sequence
  Synthetic sequence
ccccucggagucuacacccgcu

SEQ ID NO: 261 - RNA, 22 nt, Artificial Sequence
  Synthetic sequence
cccgcugugaccauaacacccc

SEQ ID NO: 262 - RNA, 22 nt, Artificial Sequence
  Synthetic sequence
cccucggagucuacacccgcug

SEQ ID NO: 263 - RNA, 22 nt, Artificial Sequence
  Synthetic sequence
ccgcugugaccauaacaccccu

SEQ ID NO: 264 - RNA, 22 nt, Artificial Sequence
  Synthetic sequence
ccucggagucuacacccgcugu

SEQ ID NO: 265 - RNA, 22 nt, Artificial Sequence
  Synthetic sequence
cggagucuacacccgcugugac

SEQ ID NO: 266 - RNA, 22 nt, Artificial Sequence
  Synthetic sequence
cggguguagacuccgaggggga

SEQ ID NO: 267 - RNA, 22 nt, Artificial Sequence
  Synthetic sequence
cgucccccucggagucuacacc

SEQ ID NO: 268 - RNA, 22 nt, Artificial Sequence
  Synthetic sequence
cuacacccgcugugaccauaac

SEQ ID NO: 269 - RNA, 22 nt, Artificial Sequence
  Synthetic sequence
cucggagucuacacccgcugug

SEQ ID NO: 270 - RNA, 22 nt, Artificial Sequence
  Synthetic sequence
gagucuacacccgcugugacca

SEQ ID NO: 271 - RNA, 22 nt, Artificial Sequence
  Synthetic sequence
gcggguguagacuccgaggggg

SEQ ID NO: 272 - RNA, 22 nt, Artificial Sequence
  Synthetic sequence
ggagucuacacccgcugugacc

SEQ ID NO: 273 - RNA, 22 nt, Artificial Sequence
  Synthetic sequence
gggguguuauggucacagcggg

SEQ ID NO: 274 - RNA, 22 nt, Artificial Sequence
  Synthetic sequence
ggguguuauggucacagcgggu

SEQ ID NO: 275 - RNA, 22 nt, Artificial Sequence
  Synthetic sequence
gguagggguguuauggucacag

SEQ ID NO: 276 - RNA, 22 nt, Artificial Sequence
  Synthetic sequence
ggucacagcggguguagacucc

SEQ ID NO: 277 - RNA, 22 nt, Artificial Sequence
  Synthetic sequence
gguguuauggucacagcgggug

SEQ ID NO: 278 - RNA, 22 nt, Artificial Sequence
  Synthetic sequence
guagggguguuauggucacagc

SEQ ID NO: 279 - RNA, 22 nt, Artificial Sequence
  Synthetic sequence
gucacagcggguguagacuccg

SEQ ID NO: 280 - RNA, 22 nt, Artificial Sequence
  Synthetic sequence
gucccccucggagucuacaccc

SEQ ID NO: 281 - RNA, 22 nt, Artificial Sequence
  Synthetic sequence
gucuacacccgcugugaccaua

SEQ ID NO: 282 - RNA, 22 nt, Artificial Sequence
  Synthetic sequence
guguuauggucacagcgggugu

SEQ ID NO: 283 - RNA, 22 nt, Artificial Sequence
  Synthetic sequence
guuauggucacagcggguguag

SEQ ID NO: 284 - RNA, 22 nt, Artificial Sequence
  Synthetic sequence
uacacccgcugugaccauaaca

SEQ ID NO: 285 - RNA, 22 nt, Artificial Sequence
  Synthetic sequence
uagggguguuauggucacagcg

SEQ ID NO: 286 - RNA, 22 nt, Artificial Sequence
  Synthetic sequence
uauggucacagcggguguagac

SEQ ID NO: 287 - RNA, 22 nt, Artificial Sequence
  Synthetic sequence
ucacagcggguguagacuccga

SEQ ID NO: 288 - RNA, 22 nt, Artificial Sequence
  Synthetic sequence
ucccccucggagucuacacccg

SEQ ID NO: 289 - RNA, 22 nt, Artificial Sequence
  Synthetic sequence
ucggagucuacacccgcuguga

SEQ ID NO: 290 - RNA, 22 nt, Artificial Sequence
  Synthetic sequence
ucuacacccgcugugaccauaa

SEQ ID NO: 291 - RNA, 22 nt, Artificial Sequence
  Synthetic sequence
uggucacagcggguguagacuc

SEQ ID NO: 292 - RNA, 22 nt, Artificial Sequence
  Synthetic sequence
uguuauggucacagcgggugua

SEQ ID NO: 293 - RNA, 22 nt, Artificial Sequence
  Synthetic sequence
uuauggucacagcggguguaga

SEQ ID NO: 294 - RNA, 21 nt, Artificial Sequence
  Synthetic sequence
acaccugcugugaccauaaca

SEQ ID NO: 295 - RNA, 21 nt, Artificial Sequence
  Synthetic sequence
acagcagguguagacuccgag

SEQ ID NO: 296 - RNA, 21 nt, Artificial Sequence
  Synthetic sequence
accugcugugaccauaacacc

SEQ ID NO: 297 - RNA, 21 nt, Artificial Sequence
  Synthetic sequence
agcagguguagacuccgaggg

SEQ ID NO: 298 - RNA, 21 nt, Artificial Sequence
  Synthetic sequence
agggguguuauggucacagca

SEQ ID NO: 299 - RNA, 21 nt, Artificial Sequence
  Synthetic sequence
agucuacaccugcugugacca

SEQ ID NO: 300 - RNA, 21 nt, Artificial Sequence
  Synthetic sequence
auggucacagcagguguagac

SEQ ID NO: 301 - RNA, 21 nt, Artificial Sequence
  Synthetic sequence
cacagcagguguagacuccga

SEQ ID NO: 302 - RNA, 21 nt, Artificial Sequence
  Synthetic sequence
caccugcugugaccauaacac

SEQ ID NO: 303 - RNA, 21 nt, Artificial Sequence
  Synthetic sequence
cagcagguguagacuccgagg

SEQ ID NO: 304 - RNA, 21 nt, Artificial Sequence
  Synthetic sequence
cagguguagacuccgaggggg

SEQ ID NO: 305 - RNA, 21 nt, Artificial Sequence
  Synthetic sequence
cccccucggagucuacaccug

SEQ ID NO: 306 - RNA, 21 nt, Artificial Sequence
  Synthetic sequence
ccccucggagucuacaccugc

SEQ ID NO: 307 - RNA, 21 nt, Artificial Sequence
  Synthetic sequence
cccucggagucuacaccugcu

SEQ ID NO: 308 - RNA, 21 nt, Artificial Sequence
  Synthetic sequence
ccucggagucuacaccugcug

SEQ ID NO: 309 - RNA, 21 nt, Artificial Sequence
  Synthetic sequence
ccugcugugaccauaacaccc

SEQ ID NO: 310 - RNA, 21 nt, Artificial Sequence
  Synthetic sequence
cggagucuacaccugcuguga

SEQ ID NO: 311 - RNA, 21 nt, Artificial Sequence
  Synthetic sequence
cuacaccugcugugaccauaa

SEQ ID NO: 312 - RNA, 21 nt, Artificial Sequence
  Synthetic sequence
cucggagucuacaccugcugu

SEQ ID NO: 313 - RNA, 21 nt, Artificial Sequence
  Synthetic sequence
cugcugugaccauaacacccc

SEQ ID NO: 314 - RNA, 21 nt, Artificial Sequence
  Synthetic sequence
gagucuacaccugcugugacc

SEQ ID NO: 315 - RNA, 21 nt, Artificial Sequence
  Synthetic sequence
gcagguguagacuccgagggg

SEQ ID NO: 316 - RNA, 21 nt, Artificial Sequence
  Synthetic sequence
ggagucuacaccugcugugac

SEQ ID NO: 317 - RNA, 21 nt, Artificial Sequence
  Synthetic sequence
gggguguuauggucacagcag

SEQ ID NO: 318 - RNA, 21 nt, Artificial Sequence
  Synthetic sequence
ggguguuauggucacagcagg

SEQ ID NO: 319 - RNA, 21 nt, Artificial Sequence
  Synthetic sequence
ggucacagcagguguagacuc

SEQ ID NO: 320 - RNA, 21 nt, Artificial Sequence
  Synthetic sequence
gguguuauggucacagcaggu

SEQ ID NO: 321 - RNA, 21 nt, Artificial Sequence
  Synthetic sequence
gucacagcagguguagacucc

SEQ ID NO: 322 - RNA, 21 nt, Artificial Sequence
  Synthetic sequence
gucuacaccugcugugaccau

SEQ ID NO: 323 - RNA, 21 nt, Artificial Sequence
  Synthetic sequence
guguuauggucacagcaggug

SEQ ID NO: 324 - RNA, 21 nt, Artificial Sequence
  Synthetic sequence
guuauggucacagcaggugua

SEQ ID NO: 325 - RNA, 21 nt, Artificial Sequence
  Synthetic sequence
uacaccugcugugaccauaac

SEQ ID NO: 326 - RNA, 21 nt, Artificial Sequence
  Synthetic sequence
uauggucacagcagguguaga

SEQ ID NO: 327 - RNA, 21 nt, Artificial Sequence
  Synthetic sequence
ucacagcagguguagacuccg

SEQ ID NO: 328 - RNA, 21 nt, Artificial Sequence
  Synthetic sequence
ucccccucggagucuacaccu

SEQ ID NO: 329 - RNA, 21 nt, Artificial Sequence
  Synthetic sequence
ucggagucuacaccugcugug

SEQ ID NO: 330 - RNA, 21 nt, Artificial Sequence
  Synthetic sequence
ucuacaccugcugugaccaua

SEQ ID NO: 331 - RNA, 21 nt, Artificial Sequence
  Synthetic sequence
uggucacagcagguguagacu

SEQ ID NO: 332 - RNA, 21 nt, Artificial Sequence
  Synthetic sequence
uguuauggucacagcaggugu

SEQ ID NO: 333 - RNA, 21 nt, Artificial Sequence
  Synthetic sequence
uuauggucacagcagguguag

SEQ ID NO: 334 - RNA, 22 nt, Artificial Sequence
  Synthetic sequence
acaccugcugugaccauaacac

SEQ ID NO: 335 - RNA, 22 nt, Artificial Sequence
  Synthetic sequence
acagcagguguagacuccgagg

SEQ ID NO: 336 - RNA, 22 nt, Artificial Sequence
  Synthetic sequence
accugcugugaccauaacaccc

SEQ ID NO: 337 - RNA, 22 nt, Artificial Sequence
  Synthetic sequence
agcagguguagacuccgagggg

SEQ ID NO: 338 - RNA, 22 nt, Artificial Sequence
  Synthetic sequence
agggguguuauggucacagcag

SEQ ID NO: 339 - RNA, 22 nt, Artificial Sequence
  Synthetic sequence
agucuacaccugcugugaccau

SEQ ID NO: 340 - RNA, 22 nt, Artificial Sequence
  Synthetic sequence
auggucacagcagguguagacu

SEQ ID NO: 341 - RNA, 22 nt, Artificial Sequence
  Synthetic sequence
cacagcagguguagacuccgag

SEQ ID NO: 342 - RNA, 22 nt, Artificial Sequence
  Synthetic sequence
caccugcugugaccauaacacc

SEQ ID NO: 343 - RNA, 22 nt, Artificial Sequence
  Synthetic sequence
cagcagguguagacuccgaggg

SEQ ID NO: 344 - RNA, 22 nt, Artificial Sequence
  Synthetic sequence
cagguguagacuccgaggggga

SEQ ID NO: 345 - RNA, 22 nt, Artificial Sequence
  Synthetic sequence
cccccucggagucuacaccugc

SEQ ID NO: 346 - RNA, 22 nt, Artificial Sequence
  Synthetic sequence
ccccucggagucuacaccugcu

SEQ ID NO: 347 - RNA, 22 nt, Artificial Sequence
  Synthetic sequence
cccucggagucuacaccugcug

SEQ ID NO: 348 - RNA, 22 nt, Artificial Sequence
  Synthetic sequence
ccucggagucuacaccugcugu

SEQ ID NO: 349 - RNA, 22 nt, Artificial Sequence
  Synthetic sequence
ccugcugugaccauaacacccc

SEQ ID NO: 350 - RNA, 22 nt, Artificial Sequence
  Synthetic sequence
cggagucuacaccugcugugac

SEQ ID NO: 351 - RNA, 22 nt, Artificial Sequence
  Synthetic sequence
cuacaccugcugugaccauaac

SEQ ID NO: 352 - RNA, 22 nt, Artificial Sequence
  Synthetic sequence
cucggagucuacaccugcugug

SEQ ID NO: 353 - RNA, 22 nt, Artificial Sequence
  Synthetic sequence
cugcugugaccauaacaccccu

SEQ ID NO: 354 - RNA, 22 nt, Artificial Sequence
  Synthetic sequence
gagucuacaccugcugugacca

SEQ ID NO: 355 - RNA, 22 nt, Artificial Sequence
  Synthetic sequence
gcagguguagacuccgaggggg

SEQ ID NO: 356 - RNA, 22 nt, Artificial Sequence
  Synthetic sequence
ggagucuacaccugcugugacc

SEQ ID NO: 357 - RNA, 22 nt, Artificial Sequence
  Synthetic sequence
gggguguuauggucacagcagg

SEQ ID NO: 358 - RNA, 22 nt, Artificial Sequence
  Synthetic sequence
ggguguuauggucacagcaggu

SEQ ID NO: 359 - RNA, 22 nt, Artificial Sequence
  Synthetic sequence
ggucacagcagguguagacucc

SEQ ID NO: 360 - RNA, 22 nt, Artificial Sequence
  Synthetic sequence
gguguuauggucacagcaggug

SEQ ID NO: 361 - RNA, 22 nt, Artificial Sequence
  Synthetic sequence
gucacagcagguguagacuccg

SEQ ID NO: 362 - RNA, 22 nt, Artificial Sequence
  Synthetic sequence
gucccccucggagucuacaccu

SEQ ID NO: 363 - RNA, 22 nt, Artificial Sequence
  Synthetic sequence
gucuacaccugcugugaccaua

SEQ ID NO: 364 - RNA, 22 nt, Artificial Sequence
  Synthetic sequence
guguuauggucacagcaggugu

SEQ ID NO: 365 - RNA, 22 nt, Artificial Sequence
  Synthetic sequence
guuauggucacagcagguguag

SEQ ID NO: 366 - RNA, 22 nt, Artificial Sequence
  Synthetic sequence
uacaccugcugugaccauaaca

SEQ ID NO: 367 - RNA, 22 nt, Artificial Sequence
  Synthetic sequence
uagggguguuauggucacagca

SEQ ID NO: 368 - RNA, 22 nt, Artificial Sequence
  Synthetic sequence
uauggucacagcagguguagac

SEQ ID NO: 369 - RNA, 22 nt, Artificial Sequence
  Synthetic sequence
ucacagcagguguagacuccga

SEQ ID NO: 370 - RNA, 22 nt, Artificial Sequence
  Synthetic sequence
ucccccucggagucuacaccug

SEQ ID NO: 371 - RNA, 22 nt, Artificial Sequence
  Synthetic sequence
ucggagucuacaccugcuguga

SEQ ID NO: 372 - RNA, 22 nt, Artificial Sequence
  Synthetic sequence
ucuacaccugcugugaccauaa

SEQ ID NO: 373 - RNA, 22 nt, Artificial Sequence
  Synthetic sequence
uggucacagcagguguagacuc

SEQ ID NO: 374 - RNA, 22 nt, Artificial Sequence
  Synthetic sequence
uguuauggucacagcaggugua

SEQ ID NO: 375 - RNA, 22 nt, Artificial Sequence
  Synthetic sequence
uuauggucacagcagguguaga

SEQ ID NO: 376 - RNA, 21 nt, Artificial Sequence
  Synthetic sequence
aaccagcucucaaagcaacac

SEQ ID NO: 377 - RNA, 21 nt, Artificial Sequence
  Synthetic sequence
accagcucucaaagcaacacu

SEQ ID NO: 378 - RNA, 21 nt, Artificial Sequence
  Synthetic sequence
agaaaguguugcuuugagagc

SEQ ID NO: 379 - RNA, 21 nt, Artificial Sequence
  Synthetic sequence
agcucucaaagcaacacuuuc

SEQ ID NO: 380 - RNA, 21 nt, Artificial Sequence
  Synthetic sequence
cagcucucaaagcaacacuuu

SEQ ID NO: 381 - RNA, 21 nt, Artificial Sequence
  Synthetic sequence
ccagcucucaaagcaacacuu

SEQ ID NO: 382 - RNA, 21 nt, Artificial Sequence
  Synthetic sequence
gcucucaaagcaacacuuucu

SEQ ID NO: 383 - RNA, 22 nt, Artificial Sequence
  Synthetic sequence
aaccagcucucaaagcaacacu

SEQ ID NO: 384 - RNA, 22 nt, Artificial Sequence
  Synthetic sequence
aagaaaguguugcuuugagagc

SEQ ID NO: 385 - RNA, 22 nt, Artificial Sequence
  Synthetic sequence
accagcucucaaagcaacacuu

SEQ ID NO: 386 - RNA, 22 nt, Artificial Sequence
  Synthetic sequence
agaaaguguugcuuugagagcu

SEQ ID NO: 387 - RNA, 22 nt, Artificial Sequence
  Synthetic sequence
agcucucaaagcaacacuuucu

SEQ ID NO: 388 - RNA, 22 nt, Artificial Sequence
  Synthetic sequence
cagcucucaaagcaacacuuuc

SEQ ID NO: 389 - RNA, 22 nt, Artificial Sequence
  Synthetic sequence
ccagcucucaaagcaacacuuu

SEQ ID NO: 390 - RNA, 22 nt, Artificial Sequence
  Synthetic sequence
gaaccagcucucaaagcaacac

SEQ ID NO: 391 - RNA, 22 nt, Artificial Sequence
  Synthetic sequence
gcucucaaagcaacacuuucuu

SEQ ID NO: 392 - RNA, 21 nt, Artificial Sequence
  Synthetic sequence
aauucccaaccucaggugaua

SEQ ID NO: 393 - RNA, 21 nt, Artificial Sequence
  Synthetic sequence
auucccaaccucaggugauac

SEQ ID NO: 394 - RNA, 21 nt, Artificial Sequence
  Synthetic sequence
cggguguaucaccugagguug

SEQ ID NO: 395 - RNA, 21 nt, Artificial Sequence
  Synthetic sequence
cuggaauucccaaccucaggu

SEQ ID NO: 396 - RNA, 21 nt, Artificial Sequence
  Synthetic sequence
gaauucccaaccucaggugau

SEQ ID NO: 397 - RNA, 21 nt, Artificial Sequence
  Synthetic sequence
ggaauucccaaccucagguga

SEQ ID NO: 398 - RNA, 21 nt, Artificial Sequence
  Synthetic sequence
ggguguaucaccugagguugg

SEQ ID NO: 399 - RNA, 21 nt, Artificial Sequence
  Synthetic sequence
gguguaucaccugagguuggg

SEQ ID NO: 400 - RNA, 21 nt, Artificial Sequence
  Synthetic sequence
guaucaccugagguugggaau

SEQ ID NO: 401 - RNA, 21 nt, Artificial Sequence
  Synthetic sequence
guguaucaccugagguuggga

SEQ ID NO: 402 - RNA, 21 nt, Artificial Sequence
  Synthetic sequence
uggaauucccaaccucaggug

SEQ ID NO: 403 - RNA, 21 nt, Artificial Sequence
  Synthetic sequence
uguaucaccugagguugggaa

SEQ ID NO: 404 - RNA, 21 nt, Artificial Sequence
  Synthetic sequence
uucccaaccucaggugauaca

SEQ ID NO: 405 - RNA, 22 nt, Artificial Sequence
  Synthetic sequence
aauucccaaccucaggugauac

SEQ ID NO: 406 - RNA, 22 nt, Artificial Sequence
  Synthetic sequence
auucccaaccucaggugauaca

SEQ ID NO: 407 - RNA, 22 nt, Artificial Sequence
  Synthetic sequence
cggguguaucaccugagguugg

SEQ ID NO: 408 - RNA, 22 nt, Artificial Sequence
  Synthetic sequence
cuggaauucccaaccucaggug

SEQ ID NO: 409 - RNA, 22 nt, Artificial Sequence
  Synthetic sequence
gaauucccaaccucaggugaua

SEQ ID NO: 410 - RNA, 22 nt, Artificial Sequence
  Synthetic sequence
gcggguguaucaccugagguug

SEQ ID NO: 411 - RNA, 22 nt, Artificial Sequence
  Synthetic sequence
gcuggaauucccaaccucaggu

SEQ ID NO: 412 - RNA, 22 nt, Artificial Sequence
  Synthetic sequence
ggaauucccaaccucaggugau

SEQ ID NO: 413 - RNA, 22 nt, Artificial Sequence
  Synthetic sequence
ggguguaucaccugagguuggg

SEQ ID NO: 414 - RNA, 22 nt, Artificial Sequence
  Synthetic sequence
gguguaucaccugagguuggga

SEQ ID NO: 415 - RNA, 22 nt, Artificial Sequence
  Synthetic sequence
guaucaccugagguugggaauu

SEQ ID NO: 416 - RNA, 22 nt, Artificial Sequence
  Synthetic sequence
guguaucaccugagguugggaa

SEQ ID NO: 417 - RNA, 22 nt, Artificial Sequence
  Synthetic sequence
uggaauucccaaccucagguga

SEQ ID NO: 418 - RNA, 22 nt, Artificial Sequence
  Synthetic sequence
uguaucaccugagguugggaau

SEQ ID NO: 419 - RNA, 22 nt, Artificial Sequence
  Synthetic sequence
uucccaaccucaggugauacac

SEQ ID NO: 420 - RNA, 22 nt, Artificial Sequence
  Synthetic sequence
acacccgccucagccucccaaa

SEQ ID NO: 421 - RNA, 22 nt, Artificial Sequence
  Synthetic sequence
auacuuugggaggcugaggcgg

SEQ ID NO: 422 - RNA, 22 nt, Artificial Sequence
  Synthetic sequence
uacacccgccucagccucccaa

SEQ ID NO: 423 - RNA, 21 nt, Artificial Sequence
  Synthetic sequence
cacguucguaaaguucuuagc

SEQ ID NO: 424 - RNA, 21 nt, Artificial Sequence
  Synthetic sequence
gcuaagaacuuuacgaacgug

SEQ ID NO: 425 - RNA, 22 nt, Artificial Sequence
  Synthetic sequence
agcuaagaacuuuacgaacgug

SEQ ID NO: 426 - RNA, 22 nt, Artificial Sequence
  Synthetic sequence
cacguucguaaaguucuuagcu

SEQ ID NO: 427 - RNA, 22 nt, Artificial Sequence
  Synthetic sequence
gcuaagaacuuuacgaacguga

SEQ ID NO: 428 - RNA, 22 nt, Artificial Sequence
  Synthetic sequence
ucacguucguaaaguucuuagc

SEQ ID NO: 429 - RNA, 21 nt, Artificial Sequence
  Synthetic sequence
aaugacugcacgugagaaugu

SEQ ID NO: 430 - RNA, 21 nt, Artificial Sequence
  Synthetic sequence
acauucucacgugcagucauu

SEQ ID NO: 431 - RNA, 21 nt, Artificial Sequence
  Synthetic sequence
acccagcgucggcacacuuaa

SEQ ID NO: 432 - RNA, 21 nt, Artificial Sequence
  Synthetic sequence
acuacauucucacgugcaguc

SEQ ID NO: 433 - RNA, 21 nt, Artificial Sequence
  Synthetic sequence
agcgucggcacacuuaauaau

SEQ ID NO: 434 - RNA, 21 nt, Artificial Sequence
  Synthetic sequence
auacuacauucucacgugcag

SEQ ID NO: 435 - RNA, 21 nt, Artificial Sequence
  Synthetic sequence
augacugcacgugagaaugua

SEQ ID NO: 436 - RNA, 21 nt, Artificial Sequence
  Synthetic sequence
cagcgucggcacacuuaauaa

SEQ ID NO: 437 - RNA, 21 nt, Artificial Sequence
  Synthetic sequence
cagucauuauuaagugugccg

SEQ ID NO: 438 - RNA, 21 nt, Artificial Sequence
  Synthetic sequence
cauuauuaagugugccgacgc

SEQ ID NO: 439 - RNA, 21 nt, Artificial Sequence
  Synthetic sequence
cauucucacgugcagucauua

SEQ ID NO: 440 - RNA, 21 nt, Artificial Sequence
  Synthetic sequence
ccagcgucggcacacuuaaua

SEQ ID NO: 441 - RNA, 21 nt, Artificial Sequence
  Synthetic sequence
cccagcgucggcacacuuaau

SEQ ID NO: 442 - RNA, 21 nt, Artificial Sequence
  Synthetic sequence
cggcacacuuaauaaugacug

SEQ ID NO: 443 - RNA, 21 nt, Artificial Sequence
  Synthetic sequence
cgucggcacacuuaauaauga

SEQ ID NO: 444 - RNA, 21 nt, Artificial Sequence
  Synthetic sequence
cuacauucucacgugcaguca

SEQ ID NO: 445 - RNA, 21 nt, Artificial Sequence
  Synthetic sequence
gcagucauuauuaagugugcc

SEQ ID NO: 446 - RNA, 21 nt, Artificial Sequence
  Synthetic sequence
gcgucggcacacuuaauaaug

SEQ ID NO: 447 - RNA, 21 nt, Artificial Sequence
  Synthetic sequence
ggcacacuuaauaaugacugc

SEQ ID NO: 448 - RNA, 21 nt, Artificial Sequence
  Synthetic sequence
gucauuauuaagugugccgac

SEQ ID NO: 449 - RNA, 21 nt, Artificial Sequence
  Synthetic sequence
gucggcacacuuaauaaugac

SEQ ID NO: 450 - RNA, 21 nt, Artificial Sequence
  Synthetic sequence
uaaugacugcacgugagaaug

SEQ ID NO: 451 - RNA, 21 nt, Artificial Sequence
  Synthetic sequence
uacauucucacgugcagucau

SEQ ID NO: 452 - RNA, 21 nt, Artificial Sequence
  Synthetic sequence
uacuacauucucacgugcagu

SEQ ID NO: 453 - RNA, 21 nt, Artificial Sequence
  Synthetic sequence
ucauuauuaagugugccgacg

SEQ ID NO: 454 - RNA, 22 nt, Artificial Sequence
  Synthetic sequence
aacccagcgucggcacacuuaa

SEQ ID NO: 455 - RNA, 22 nt, Artificial Sequence
  Synthetic sequence
aaugacugcacgugagaaugua

SEQ ID NO: 456 - RNA, 22 nt, Artificial Sequence
  Synthetic sequence
acauucucacgugcagucauua

SEQ ID NO: 457 - RNA, 22 nt, Artificial Sequence
  Synthetic sequence
acccagcgucggcacacuuaau

SEQ ID NO: 458 - RNA, 22 nt, Artificial Sequence
  Synthetic sequence
acuacauucucacgugcaguca

SEQ ID NO: 459 - RNA, 22 nt, Artificial Sequence
  Synthetic sequence
agcgucggcacacuuaauaaug

SEQ ID NO: 460 - RNA, 22 nt, Artificial Sequence
  Synthetic sequence
agucauuauuaagugugccgac

SEQ ID NO: 461 - RNA, 22 nt, Artificial Sequence
  Synthetic sequence
auaaugacugcacgugagaaug

SEQ ID NO: 462 - RNA, 22 nt, Artificial Sequence
  Synthetic sequence
auacuacauucucacgugcagu

SEQ ID NO: 463 - RNA, 22 nt, Artificial Sequence
  Synthetic sequence
augacugcacgugagaauguag

SEQ ID NO: 464 - RNA, 22 nt, Artificial Sequence
  Synthetic sequence
cacacuuaauaaugacugcacg

SEQ ID NO: 465 - RNA, 22 nt, Artificial Sequence
  Synthetic sequence
cacgugcagucauuauuaagug

SEQ ID NO: 466 - RNA, 22 nt, Artificial Sequence
  Synthetic sequence
cacuuaauaaugacugcacgug

SEQ ID NO: 467 - RNA, 22 nt, Artificial Sequence
  Synthetic sequence
cagcgucggcacacuuaauaau

SEQ ID NO: 468 - RNA, 22 nt, Artificial Sequence
  Synthetic sequence
cagucauuauuaagugugccga

SEQ ID NO: 469 - RNA, 22 nt, Artificial Sequence
  Synthetic sequence
cauuauuaagugugccgacgcu

SEQ ID NO: 470 - RNA, 22 nt, Artificial Sequence
  Synthetic sequence
cauucucacgugcagucauuau

SEQ ID NO: 471 - RNA, 22 nt, Artificial Sequence
  Synthetic sequence
ccagcgucggcacacuuaauaa

SEQ ID NO: 472 - RNA, 22 nt, Artificial Sequence
  Synthetic sequence
cccagcgucggcacacuuaaua

SEQ ID NO: 473 - RNA, 22 nt, Artificial Sequence
  Synthetic sequence
cggcacacuuaauaaugacugc

SEQ ID NO: 474 - RNA, 22 nt, Artificial Sequence
  Synthetic sequence
cgucggcacacuuaauaaugac

SEQ ID NO: 475 - RNA, 22 nt, Artificial Sequence
  Synthetic sequence
cgugcagucauuauuaagugug

SEQ ID NO: 476 - RNA, 22 nt, Artificial Sequence
  Synthetic sequence
cuacauucucacgugcagucau

SEQ ID NO: 477 - RNA, 22 nt, Artificial Sequence
  Synthetic sequence
cucacgugcagucauuauuaag

SEQ ID NO: 478 - RNA, 22 nt, Artificial Sequence
  Synthetic sequence
cuuaauaaugacugcacgugag

SEQ ID NO: 479 - RNA, 22 nt, Artificial Sequence
  Synthetic sequence
gcacacuuaauaaugacugcac

SEQ ID NO: 480 - RNA, 22 nt, Artificial Sequence
  Synthetic sequence
gcagucauuauuaagugugccg

SEQ ID NO: 481 - RNA, 22 nt, Artificial Sequence
  Synthetic sequence
gcgucggcacacuuaauaauga

SEQ ID NO: 482 - RNA, 22 nt, Artificial Sequence
  Synthetic sequence
ggcacacuuaauaaugacugca

SEQ ID NO: 483 - RNA, 22 nt, Artificial Sequence
  Synthetic sequence
guauacuacauucucacgugca

SEQ ID NO: 484 - RNA, 22 nt, Artificial Sequence
  Synthetic sequence
gucauuauuaagugugccgacg

SEQ ID NO: 485 - RNA, 22 nt, Artificial Sequence
  Synthetic sequence
gucggcacacuuaauaaugacu

SEQ ID NO: 486 - RNA, 22 nt, Artificial Sequence
  Synthetic sequence
gugcagucauuauuaagugugc

SEQ ID NO: 487 - RNA, 22 nt, Artificial Sequence
  Synthetic sequence
uaaugacugcacgugagaaugu

SEQ ID NO: 488 - RNA, 22 nt, Artificial Sequence
  Synthetic sequence
uacauucucacgugcagucauu

SEQ ID NO: 489 - RNA, 22 nt, Artificial Sequence
  Synthetic sequence
uacuacauucucacgugcaguc

SEQ ID NO: 490 - RNA, 22 nt, Artificial Sequence
  Synthetic sequence
uauacuacauucucacgugcag

SEQ ID NO: 491 - RNA, 22 nt, Artificial Sequence
  Synthetic sequence
ucauuauuaagugugccgacgc

SEQ ID NO: 492 - RNA, 22 nt, Artificial Sequence
  Synthetic sequence
ucggcacacuuaauaaugacug

SEQ ID NO: 493 - RNA, 22 nt, Artificial Sequence
  Synthetic sequence
ugcagucauuauuaagugugcc

SEQ ID NO: 494 - RNA, 21 nt, Artificial Sequence
  Synthetic sequence
aaagacugcacgugagaaugu

SEQ ID NO: 495 - RNA, 21 nt, Artificial Sequence
  Synthetic sequence
aagacugcacgugagaaugua

SEQ ID NO: 496 - RNA, 21 nt, Artificial Sequence
  Synthetic sequence
acauucucacgugcagucuuu

SEQ ID NO: 497 - RNA, 21 nt, Artificial Sequence
  Synthetic sequence
agcgucggcacacuuaauaaa

SEQ ID NO: 498 - RNA, 21 nt, Artificial Sequence
  Synthetic sequence
cagucuuuauuaagugugccg

SEQ ID NO: 499 - RNA, 21 nt, Artificial Sequence
  Synthetic sequence
cauucucacgugcagucuuua

SEQ ID NO: 500 - RNA, 21 nt, Artificial Sequence
  Synthetic sequence
cggcacacuuaauaaagacug

SEQ ID NO: 501 - RNA, 21 nt, Artificial Sequence
  Synthetic sequence
cgucggcacacuuaauaaaga

SEQ ID NO: 502 - RNA, 21 nt, Artificial Sequence
  Synthetic sequence
cuacauucucacgugcagucu

SEQ ID NO: 503 - RNA, 21 nt, Artificial Sequence
  Synthetic sequence
cuuuauuaagugugccgacgc

SEQ ID NO: 504 - RNA, 21 nt, Artificial Sequence
  Synthetic sequence
gcagucuuuauuaagugugcc

SEQ ID NO: 505 - RNA, 21 nt, Artificial Sequence
  Synthetic sequence
gcgucggcacacuuaauaaag

SEQ ID NO: 506 - RNA, 21 nt, Artificial Sequence
  Synthetic sequence
ggcacacuuaauaaagacugc

SEQ ID NO: 507 - RNA, 21 nt, Artificial Sequence
  Synthetic sequence
gucggcacacuuaauaaagac

SEQ ID NO: 508 - RNA, 21 nt, Artificial Sequence
  Synthetic sequence
gucuuuauuaagugugccgac

SEQ ID NO: 509 - RNA, 21 nt, Artificial Sequence
  Synthetic sequence
uaaagacugcacgugagaaug

SEQ ID NO: 510 - RNA, 21 nt, Artificial Sequence
  Synthetic sequence
uacauucucacgugcagucuu

SEQ ID NO: 511 - RNA, 21 nt, Artificial Sequence
  Synthetic sequence
ucuuuauuaagugugccgacg

SEQ ID NO: 512 - RNA, 22 nt, Artificial Sequence
  Synthetic sequence
aaagacugcacgugagaaugua

SEQ ID NO: 513 - RNA, 22 nt, Artificial Sequence
  Synthetic sequence
aagacugcacgugagaauguag

SEQ ID NO: 514 - RNA, 22 nt, Artificial Sequence
  Synthetic sequence
acauucucacgugcagucuuua

SEQ ID NO: 515 - RNA, 22 nt, Artificial Sequence
  Synthetic sequence
acuacauucucacgugcagucu

SEQ ID NO: 516 - RNA, 22 nt, Artificial Sequence
  Synthetic sequence
agcgucggcacacuuaauaaag

SEQ ID NO: 517 - RNA, 22 nt, Artificial Sequence
  Synthetic sequence
agucuuuauuaagugugccgac

SEQ ID NO: 518 - RNA, 22 nt, Artificial Sequence
  Synthetic sequence
auaaagacugcacgugagaaug

SEQ ID NO: 519 - RNA, 22 nt, Artificial Sequence
  Synthetic sequence
cacacuuaauaaagacugcacg

SEQ ID NO: 520 - RNA, 22 nt, Artificial Sequence
  Synthetic sequence
cacgugcagucuuuauuaagug

SEQ ID NO: 521 - RNA, 22 nt, Artificial Sequence
  Synthetic sequence
cacuuaauaaagacugcacgug

SEQ ID NO: 522 - RNA, 22 nt, Artificial Sequence
  Synthetic sequence
cagcgucggcacacuuaauaaa

SEQ ID NO: 523 - RNA, 22 nt, Artificial Sequence
  Synthetic sequence
cagucuuuauuaagugugccga

SEQ ID NO: 524 - RNA, 22 nt, Artificial Sequence
  Synthetic sequence
cauucucacgugcagucuuuau

SEQ ID NO: 525 - RNA, 22 nt, Artificial Sequence
  Synthetic sequence
cggcacacuuaauaaagacugc

SEQ ID NO: 526 - RNA, 22 nt, Artificial Sequence
  Synthetic sequence
cgucggcacacuuaauaaagac

SEQ ID NO: 527 - RNA, 22 nt, Artificial Sequence
  Synthetic sequence
cgugcagucuuuauuaagugug

SEQ ID NO: 528 - RNA, 22 nt, Artificial Sequence
  Synthetic sequence
cuacauucucacgugcagucuu

SEQ ID NO: 529 - RNA, 22 nt, Artificial Sequence
  Synthetic sequence
cucacgugcagucuuuauuaag

SEQ ID NO: 530 - RNA, 22 nt, Artificial Sequence
  Synthetic sequence
cuuaauaaagacugcacgugag

SEQ ID NO: 531 - RNA, 22 nt, Artificial Sequence
  Synthetic sequence
cuuuauuaagugugccgacgcu

SEQ ID NO: 532 - RNA, 22 nt, Artificial Sequence
  Synthetic sequence
gcacacuuaauaaagacugcac

SEQ ID NO: 533 - RNA, 22 nt, Artificial Sequence
  Synthetic sequence
gcagucuuuauuaagugugccg

SEQ ID NO: 534 - RNA, 22 nt, Artificial Sequence
  Synthetic sequence
gcgucggcacacuuaauaaaga

SEQ ID NO: 535 - RNA, 22 nt, Artificial Sequence
  Synthetic sequence
ggcacacuuaauaaagacugca

SEQ ID NO: 536 - RNA, 22 nt, Artificial Sequence
  Synthetic sequence
gucggcacacuuaauaaagacu

SEQ ID NO: 537 - RNA, 22 nt, Artificial Sequence
  Synthetic sequence
gucuuuauuaagugugccgacg

SEQ ID NO: 538 - RNA, 22 nt, Artificial Sequence
  Synthetic sequence
gugcagucuuuauuaagugugc

SEQ ID NO: 539 - RNA, 22 nt, Artificial Sequence
  Synthetic sequence
uaaagacugcacgugagaaugu

SEQ ID NO: 540 - RNA, 22 nt, Artificial Sequence
  Synthetic sequence
uacauucucacgugcagucuuu

SEQ ID NO: 541 - RNA, 22 nt, Artificial Sequence
  Synthetic sequence
ucggcacacuuaauaaagacug

SEQ ID NO: 542 - RNA, 22 nt, Artificial Sequence
  Synthetic sequence
ucuuuauuaagugugccgacgc

SEQ ID NO: 543 - RNA, 22 nt, Artificial Sequence
  Synthetic sequence
ugcagucuuuauuaagugugcc

SEQ ID NO: 544 - RNA, 21 nt, Artificial Sequence
  Synthetic sequence
aaagauacggcgucccccacc

SEQ ID NO: 545 - RNA, 21 nt, Artificial Sequence
  Synthetic sequence
aagauacggcgucccccaccc

SEQ ID NO: 546 - RNA, 21 nt, Artificial Sequence
  Synthetic sequence
aagccccuuccaaagauacgg

SEQ ID NO: 547 - RNA, 21 nt, Artificial Sequence
  Synthetic sequence
acgccguaucuuuggaagggg

SEQ ID NO: 548 - RNA, 21 nt, Artificial Sequence
  Synthetic sequence
acggcgucccccaccccugaa

SEQ ID NO: 549 - RNA, 21 nt, Artificial Sequence
  Synthetic sequence
agauacggcgucccccacccc

SEQ ID NO: 550 - RNA, 21 nt, Artificial Sequence
  Synthetic sequence
agccccuuccaaagauacggc

SEQ ID NO: 551 - RNA, 21 nt, Artificial Sequence
  Synthetic sequence
aggccaagccccuuccaaaga

SEQ ID NO: 552 - RNA, 21 nt, Artificial Sequence
  Synthetic sequence
aggggugggggacgccguauc

SEQ ID NO: 553 - RNA, 21 nt, Artificial Sequence
  Synthetic sequence
auacggcgucccccaccccug

SEQ ID NO: 554 - RNA, 21 nt, Artificial Sequence
  Synthetic sequence
auuucaggggugggggacgcc

SEQ ID NO: 555 - RNA, 21 nt, Artificial Sequence
  Synthetic sequence
caaagauacggcgucccccac

SEQ ID NO: 556 - RNA, 21 nt, Artificial Sequence
  Synthetic sequence
caagccccuuccaaagauacg

SEQ ID NO: 557 - RNA, 21 nt, Artificial Sequence
  Synthetic sequence
caggggugggggacgccguau

SEQ ID NO: 558 - RNA, 21 nt, Artificial Sequence
  Synthetic sequence
ccaaagauacggcguccccca

SEQ ID NO: 559 - RNA, 21 nt, Artificial Sequence
  Synthetic sequence
ccaagccccuuccaaagauac

SEQ ID NO: 560 - RNA, 21 nt, Artificial Sequence
  Synthetic sequence
ccccuuccaaagauacggcgu

SEQ ID NO: 561 - RNA, 21 nt, Artificial Sequence
  Synthetic sequence
cccuuccaaagauacggcguc

SEQ ID NO: 562 - RNA, 21 nt, Artificial Sequence
  Synthetic sequence
ccguaucuuuggaaggggcuu

SEQ ID NO: 563 - RNA, 21 nt, Artificial Sequence
  Synthetic sequence
ccuuccaaagauacggcgucc

SEQ ID NO: 564 - RNA, 21 nt, Artificial Sequence
  Synthetic sequence
cgccguaucuuuggaaggggc

SEQ ID NO: 565 - RNA, 21 nt, Artificial Sequence
  Synthetic sequence
cggcgucccccaccccugaaa

SEQ ID NO: 566 - RNA, 21 nt, Artificial Sequence
  Synthetic sequence
cuuccaaagauacggcguccc

SEQ ID NO: 567 - RNA, 21 nt, Artificial Sequence
  Synthetic sequence
gacgccguaucuuuggaaggg

SEQ ID NO: 568 - RNA, 21 nt, Artificial Sequence
  Synthetic sequence
gauacggcgucccccaccccu

SEQ ID NO: 569 - RNA, 21 nt, Artificial Sequence
  Synthetic sequence
gauuucaggggugggggacgc

SEQ ID NO: 570 - RNA, 21 nt, Artificial Sequence
  Synthetic sequence
gccaagccccuuccaaagaua

SEQ ID NO: 571 - RNA, 21 nt, Artificial Sequence
  Synthetic sequence
gccccuuccaaagauacggcg

SEQ ID NO: 572 - RNA, 21 nt, Artificial Sequence
  Synthetic sequence
gccguaucuuuggaaggggcu

SEQ ID NO: 573 - RNA, 21 nt, Artificial Sequence
  Synthetic sequence
ggacgccguaucuuuggaagg

SEQ ID NO: 574 - RNA, 21 nt, Artificial Sequence
  Synthetic sequence
ggauuucaggggugggggacg

SEQ ID NO: 575 - RNA, 21 nt, Artificial Sequence
  Synthetic sequence
ggccaagccccuuccaaagau

SEQ ID NO: 576 - RNA, 21 nt, Artificial Sequence
  Synthetic sequence
gggacgccguaucuuuggaag

SEQ ID NO: 577 - RNA, 21 nt, Artificial Sequence
  Synthetic sequence
gggauuucaggggugggggac

SEQ ID NO: 578 - RNA, 21 nt, Artificial Sequence
  Synthetic sequence
ggggacgccguaucuuuggaa

SEQ ID NO: 579 - RNA, 21 nt, Artificial Sequence
  Synthetic sequence
ggggauuucagggguggggga

SEQ ID NO: 580 - RNA, 21 nt, Artificial Sequence
  Synthetic sequence
gggggacgccguaucuuugga

SEQ ID NO: 581 - RNA, 21 nt, Artificial Sequence
  Synthetic sequence
ggggugggggacgccguaucu

SEQ ID NO: 582 - RNA, 21 nt, Artificial Sequence
  Synthetic sequence
gggugggggacgccguaucuu

SEQ ID NO: 583 - RNA, 21 nt, Artificial Sequence
  Synthetic sequence
ggugggggacgccguaucuuu

SEQ ID NO: 584 - RNA, 21 nt, Artificial Sequence
  Synthetic sequence
gugggggacgccguaucuuug

SEQ ID NO: 585 - RNA, 21 nt, Artificial Sequence
  Synthetic sequence
uacggcgucccccaccccuga

SEQ ID NO: 586 - RNA, 21 nt, Artificial Sequence
  Synthetic sequence
ucaggggugggggacgccgua

SEQ ID NO: 587 - RNA, 21 nt, Artificial Sequence
  Synthetic sequence
uccaaagauacggcguccccc

SEQ ID NO: 588 - RNA, 21 nt, Artificial Sequence
  Synthetic sequence
ugggggacgccguaucuuugg

SEQ ID NO: 589 - RNA, 21 nt, Artificial Sequence
  Synthetic sequence
uucaggggugggggacgccgu

SEQ ID NO: 590 - RNA, 21 nt, Artificial Sequence
  Synthetic sequence
uuccaaagauacggcgucccc

SEQ ID NO: 591 - RNA, 21 nt, Artificial Sequence
  Synthetic sequence
uuucaggggugggggacgccg

SEQ ID NO: 592 - RNA, 22 nt, Artificial Sequence
  Synthetic sequence
aaagauacggcgucccccaccc

SEQ ID NO: 593 - RNA, 22 nt, Artificial Sequence
  Synthetic sequence
aagauacggcgucccccacccc

SEQ ID NO: 594 - RNA, 22 nt, Artificial Sequence
  Synthetic sequence
aagccccuuccaaagauacggc

SEQ ID NO: 595 - RNA, 22 nt, Artificial Sequence
  Synthetic sequence
acgccguaucuuuggaaggggc

SEQ ID NO: 596 - RNA, 22 nt, Artificial Sequence
  Synthetic sequence
acggcgucccccaccccugaaa

SEQ ID NO: 597 - RNA, 22 nt, Artificial Sequence
  Synthetic sequence
agauacggcgucccccaccccu

SEQ ID NO: 598 - RNA, 22 nt, Artificial Sequence
  Synthetic sequence
agccccuuccaaagauacggcg

SEQ ID NO: 599 - RNA, 22 nt, Artificial Sequence
  Synthetic sequence
aggccaagccccuuccaaagau

SEQ ID NO: 600 - RNA, 22 nt, Artificial Sequence
  Synthetic sequence
aggggugggggacgccguaucu

SEQ ID NO: 601 - RNA, 22 nt, Artificial Sequence
  Synthetic sequence
auacggcgucccccaccccuga

SEQ ID NO: 602 - RNA, 22 nt, Artificial Sequence
  Synthetic sequence
auuucaggggugggggacgccg

SEQ ID NO: 603 - RNA, 22 nt, Artificial Sequence
  Synthetic sequence
caaagauacggcgucccccacc

SEQ ID NO: 604 - RNA, 22 nt, Artificial Sequence
  Synthetic sequence
caagccccuuccaaagauacgg

SEQ ID NO: 605 - RNA, 22 nt, Artificial Sequence
  Synthetic sequence
caggggugggggacgccguauc

SEQ ID NO: 606 - RNA, 22 nt, Artificial Sequence
  Synthetic sequence
ccaaagauacggcgucccccac

SEQ ID NO: 607 - RNA, 22 nt, Artificial Sequence
  Synthetic sequence
ccaagccccuuccaaagauacg

SEQ ID NO: 608 - RNA, 22 nt, Artificial Sequence
  Synthetic sequence
ccccuuccaaagauacggcguc

SEQ ID NO: 609 - RNA, 22 nt, Artificial Sequence
  Synthetic sequence
cccuuccaaagauacggcgucc

SEQ ID NO: 610 - RNA, 22 nt, Artificial Sequence
  Synthetic sequence
ccguaucuuuggaaggggcuug

SEQ ID NO: 611 - RNA, 22 nt, Artificial Sequence
  Synthetic sequence
ccuuccaaagauacggcguccc

SEQ ID NO: 612 - RNA, 22 nt, Artificial Sequence
  Synthetic sequence
cgccguaucuuuggaaggggcu

SEQ ID NO: 613 - RNA, 22 nt, Artificial Sequence
  Synthetic sequence
cggcgucccccaccccugaaau

SEQ ID NO: 614 - RNA, 22 nt, Artificial Sequence
  Synthetic sequence
cuuccaaagauacggcgucccc

SEQ ID NO: 615 - RNA, 22 nt, Artificial Sequence
  Synthetic sequence
gacgccguaucuuuggaagggg

SEQ ID NO: 616 - RNA, 22 nt, Artificial Sequence
  Synthetic sequence
gaggccaagccccuuccaaaga

SEQ ID NO: 617 - RNA, 22 nt, Artificial Sequence
  Synthetic sequence
gauacggcgucccccaccccug

SEQ ID NO: 618 - RNA, 22 nt, Artificial Sequence
  Synthetic sequence
gauuucaggggugggggacgcc

SEQ ID NO: 619 - RNA, 22 nt, Artificial Sequence
  Synthetic sequence
gccaagccccuuccaaagauac

SEQ ID NO: 620 - RNA, 22 nt, Artificial Sequence
  Synthetic sequence
gccccuuccaaagauacggcgu

SEQ ID NO: 621 - RNA, 22 nt, Artificial Sequence
  Synthetic sequence
gccguaucuuuggaaggggcuu

SEQ ID NO: 622 - RNA, 22 nt, Artificial Sequence
  Synthetic sequence
ggacgccguaucuuuggaaggg

SEQ ID NO: 623 - RNA, 22 nt, Artificial Sequence
  Synthetic sequence
ggauuucaggggugggggacgc

SEQ ID NO: 624 - RNA, 22 nt, Artificial Sequence
  Synthetic sequence
ggccaagccccuuccaaagaua

SEQ ID NO: 625 - RNA, 22 nt, Artificial Sequence
  Synthetic sequence
gggacgccguaucuuuggaagg

SEQ ID NO: 626 - RNA, 22 nt, Artificial Sequence
  Synthetic sequence
gggauuucaggggugggggacg

SEQ ID NO: 627 - RNA, 22 nt, Artificial Sequence
  Synthetic sequence
ggggacgccguaucuuuggaag

SEQ ID NO: 628 - RNA, 22 nt, Artificial Sequence
  Synthetic sequence
ggggauuucaggggugggggac

SEQ ID NO: 629 - RNA, 22 nt, Artificial Sequence
  Synthetic sequence
gggggacgccguaucuuuggaa

SEQ ID NO: 630 - RNA, 22 nt, Artificial Sequence
  Synthetic sequence
gggggauuucagggguggggga

SEQ ID NO: 631 - RNA, 22 nt, Artificial Sequence
  Synthetic sequence
ggggugggggacgccguaucuu

SEQ ID NO: 632 - RNA, 22 nt, Artificial Sequence
  Synthetic sequence
gggugggggacgccguaucuuu

SEQ ID NO: 633 - RNA, 22 nt, Artificial Sequence
  Synthetic sequence
ggugggggacgccguaucuuug

SEQ ID NO: 634 - RNA, 22 nt, Artificial Sequence
  Synthetic sequence
gugggggacgccguaucuuugg

SEQ ID NO: 635 - RNA, 22 nt, Artificial Sequence
  Synthetic sequence
uacggcgucccccaccccugaa

SEQ ID NO: 636 - RNA, 22 nt, Artificial Sequence
  Synthetic sequence
ucaggggugggggacgccguau

SEQ ID NO: 637 - RNA, 22 nt, Artificial Sequence
  Synthetic sequence
uccaaagauacggcguccccca

SEQ ID NO: 638 - RNA, 22 nt, Artificial Sequence
  Synthetic sequence
ugggggacgccguaucuuugga

SEQ ID NO: 639 - RNA, 22 nt, Artificial Sequence
  Synthetic sequence
uucaggggugggggacgccgua

SEQ ID NO: 640 - RNA, 22 nt, Artificial Sequence
  Synthetic sequence
uuccaaagauacggcguccccc

SEQ ID NO: 641 - RNA, 22 nt, Artificial Sequence
  Synthetic sequence
uuucaggggugggggacgccgu

SEQ ID NO: 642 - RNA, 21 nt, Artificial Sequence
  Synthetic sequence
aaagauacagcgucccccacc

SEQ ID NO: 643 - RNA, 21 nt, Artificial Sequence
  Synthetic sequence
aagauacagcgucccccaccc

SEQ ID NO: 644 - RNA, 21 nt, Artificial Sequence
  Synthetic sequence
aagccccuuccaaagauacag

SEQ ID NO: 645 - RNA, 21 nt, Artificial Sequence
  Synthetic sequence
acagcgucccccaccccugaa

SEQ ID NO: 646 - RNA, 21 nt, Artificial Sequence
  Synthetic sequence
acgcuguaucuuuggaagggg

SEQ ID NO: 647 - RNA, 21 nt, Artificial Sequence
  Synthetic sequence
agauacagcgucccccacccc

SEQ ID NO: 648 - RNA, 21 nt, Artificial Sequence
  Synthetic sequence
agccccuuccaaagauacagc

SEQ ID NO: 649 - RNA, 21 nt, Artificial Sequence
  Synthetic sequence
aggggugggggacgcuguauc

SEQ ID NO: 650 - RNA, 21 nt, Artificial Sequence
  Synthetic sequence
auacagcgucccccaccccug

SEQ ID NO: 651 - RNA, 21 nt, Artificial Sequence
  Synthetic sequence
auuucaggggugggggacgcu

SEQ ID NO: 652 - RNA, 21 nt, Artificial Sequence
  Synthetic sequence
caaagauacagcgucccccac

SEQ ID NO: 653 - RNA, 21 nt, Artificial Sequence
  Synthetic sequence
caagccccuuccaaagauaca

SEQ ID NO: 654 - RNA, 21 nt, Artificial Sequence
  Synthetic sequence
cagcgucccccaccccugaaa

SEQ ID NO: 655 - RNA, 21 nt, Artificial Sequence
  Synthetic sequence
caggggugggggacgcuguau

SEQ ID NO: 656 - RNA, 21 nt, Artificial Sequence
  Synthetic sequence
ccaaagauacagcguccccca

SEQ ID NO: 657 - RNA, 21 nt, Artificial Sequence
  Synthetic sequence
ccccuuccaaagauacagcgu

SEQ ID NO: 658 - RNA, 21 nt, Artificial Sequence
  Synthetic sequence
cccuuccaaagauacagcguc

SEQ ID NO: 659 - RNA, 21 nt, Artificial Sequence
  Synthetic sequence
ccuuccaaagauacagcgucc

SEQ ID NO: 660 - RNA, 21 nt, Artificial Sequence
  Synthetic sequence
cgcuguaucuuuggaaggggc

SEQ ID NO: 661 - RNA, 21 nt, Artificial Sequence
  Synthetic sequence
cuguaucuuuggaaggggcuu

SEQ ID NO: 662 - RNA, 21 nt, Artificial Sequence
  Synthetic sequence
cuuccaaagauacagcguccc

SEQ ID NO: 663 - RNA, 21 nt, Artificial Sequence
  Synthetic sequence
gacgcuguaucuuuggaaggg

SEQ ID NO: 664 - RNA, 21 nt, Artificial Sequence
  Synthetic sequence
gauacagcgucccccaccccu

SEQ ID NO: 665 - RNA, 21 nt, Artificial Sequence
  Synthetic sequence
gccccuuccaaagauacagcg

SEQ ID NO: 666 - RNA, 21 nt, Artificial Sequence
  Synthetic sequence
gcuguaucuuuggaaggggcu

SEQ ID NO: 667 - RNA, 21 nt, Artificial Sequence
  Synthetic sequence
ggacgcuguaucuuuggaagg

SEQ ID NO: 668 - RNA, 21 nt, Artificial Sequence
  Synthetic sequence
gggacgcuguaucuuuggaag

SEQ ID NO: 669 - RNA, 21 nt, Artificial Sequence
  Synthetic sequence
ggggacgcuguaucuuuggaa

SEQ ID NO: 670 - RNA, 21 nt, Artificial Sequence
  Synthetic sequence
gggggacgcuguaucuuugga

SEQ ID NO: 671 - RNA, 21 nt, Artificial Sequence
  Synthetic sequence
ggggugggggacgcuguaucu

SEQ ID NO: 672 - RNA, 21 nt, Artificial Sequence
  Synthetic sequence
gggugggggacgcuguaucuu

SEQ ID NO: 673 - RNA, 21 nt, Artificial Sequence
  Synthetic sequence
ggugggggacgcuguaucuuu

SEQ ID NO: 674 - RNA, 21 nt, Artificial Sequence
  Synthetic sequence
gugggggacgcuguaucuuug

SEQ ID NO: 675 - RNA, 21 nt, Artificial Sequence
  Synthetic sequence
uacagcgucccccaccccuga

SEQ ID NO: 676 - RNA, 21 nt, Artificial Sequence
  Synthetic sequence
ucaggggugggggacgcugua

SEQ ID NO: 677 - RNA, 21 nt, Artificial Sequence
  Synthetic sequence
uccaaagauacagcguccccc

SEQ ID NO: 678 - RNA, 21 nt, Artificial Sequence
  Synthetic sequence
ugggggacgcuguaucuuugg

SEQ ID NO: 679 - RNA, 21 nt, Artificial Sequence
  Synthetic sequence
uucaggggugggggacgcugu

SEQ ID NO: 680 - RNA, 21 nt, Artificial Sequence
  Synthetic sequence
uuccaaagauacagcgucccc

SEQ ID NO: 681 - RNA, 21 nt, Artificial Sequence
  Synthetic sequence
uuucaggggugggggacgcug

SEQ ID NO: 682 - RNA, 22 nt, Artificial Sequence
  Synthetic sequence
aaagauacagcgucccccaccc

SEQ ID NO: 683 - RNA, 22 nt, Artificial Sequence
  Synthetic sequence
aagauacagcgucccccacccc

SEQ ID NO: 684 - RNA, 22 nt, Artificial Sequence
  Synthetic sequence
aagccccuuccaaagauacagc

SEQ ID NO: 685 - RNA, 22 nt, Artificial Sequence
  Synthetic sequence
acagcgucccccaccccugaaa

SEQ ID NO: 686 - RNA, 22 nt, Artificial Sequence
  Synthetic sequence
acgcuguaucuuuggaaggggc

SEQ ID NO: 687 - RNA, 22 nt, Artificial Sequence
  Synthetic sequence
agauacagcgucccccaccccu

SEQ ID NO: 688 - RNA, 22 nt, Artificial Sequence
  Synthetic sequence
agccccuuccaaagauacagcg

SEQ ID NO: 689 - RNA, 22 nt, Artificial Sequence
  Synthetic sequence
aggggugggggacgcuguaucu

SEQ ID NO: 690 - RNA, 22 nt, Artificial Sequence
  Synthetic sequence
auacagcgucccccaccccuga

SEQ ID NO: 691 - RNA, 22 nt, Artificial Sequence
  Synthetic sequence
auuucaggggugggggacgcug

SEQ ID NO: 692 - RNA, 22 nt, Artificial Sequence
  Synthetic sequence
caaagauacagcgucccccacc

SEQ ID NO: 693 - RNA, 22 nt, Artificial Sequence
  Synthetic sequence
caagccccuuccaaagauacag

SEQ ID NO: 694 - RNA, 22 nt, Artificial Sequence
  Synthetic sequence
cagcgucccccaccccugaaau

SEQ ID NO: 695 - RNA, 22 nt, Artificial Sequence
  Synthetic sequence
caggggugggggacgcuguauc

SEQ ID NO: 696 - RNA, 22 nt, Artificial Sequence
  Synthetic sequence
ccaaagauacagcgucccccac

SEQ ID NO: 697 - RNA, 22 nt, Artificial Sequence
  Synthetic sequence
ccaagccccuuccaaagauaca

SEQ ID NO: 698 - RNA, 22 nt, Artificial Sequence
  Synthetic sequence
ccccuuccaaagauacagcguc

SEQ ID NO: 699 - RNA, 22 nt, Artificial Sequence
  Synthetic sequence
cccuuccaaagauacagcgucc

SEQ ID NO: 700 - RNA, 22 nt, Artificial Sequence
  Synthetic sequence
ccuuccaaagauacagcguccc

SEQ ID NO: 701 - RNA, 22 nt, Artificial Sequence
  Synthetic sequence
cgcuguaucuuuggaaggggcu

SEQ ID NO: 702 - RNA, 22 nt, Artificial Sequence
  Synthetic sequence
cuguaucuuuggaaggggcuug

SEQ ID NO: 703 - RNA, 22 nt, Artificial Sequence
  Synthetic sequence
cuuccaaagauacagcgucccc

SEQ ID NO: 704 - RNA, 22 nt, Artificial Sequence
  Synthetic sequence
gacgcuguaucuuuggaagggg

SEQ ID NO: 705 - RNA, 22 nt, Artificial Sequence
  Synthetic sequence
gauacagcgucccccaccccug

SEQ ID NO: 706 - RNA, 22 nt, Artificial Sequence
  Synthetic sequence
gauuucaggggugggggacgcu

SEQ ID NO: 707 - RNA, 22 nt, Artificial Sequence
  Synthetic sequence
gccccuuccaaagauacagcgu

SEQ ID NO: 708 - RNA, 22 nt, Artificial Sequence
  Synthetic sequence
gcuguaucuuuggaaggggcuu

SEQ ID NO: 709 - RNA, 22 nt, Artificial Sequence
  Synthetic sequence
ggacgcuguaucuuuggaaggg

SEQ ID NO: 710 - RNA, 22 nt, Artificial Sequence
  Synthetic sequence
gggacgcuguaucuuuggaagg

SEQ ID NO: 711 - RNA, 22 nt, Artificial Sequence
  Synthetic sequence
ggggacgcuguaucuuuggaag

SEQ ID NO: 712 - RNA, 22 nt, Artificial Sequence
  Synthetic sequence
gggggacgcuguaucuuuggaa

SEQ ID NO: 713 - RNA, 22 nt, Artificial Sequence
  Synthetic sequence
ggggugggggacgcuguaucuu

SEQ ID NO: 714 - RNA, 22 nt, Artificial Sequence
  Synthetic sequence
gggugggggacgcuguaucuuu

SEQ ID NO: 715 - RNA, 22 nt, Artificial Sequence
  Synthetic sequence
ggugggggacgcuguaucuuug

SEQ ID NO: 716 - RNA, 22 nt, Artificial Sequence
  Synthetic sequence
gugggggacgcuguaucuuugg

SEQ ID NO: 717 - RNA, 22 nt, Artificial Sequence
  Synthetic sequence
uacagcgucccccaccccugaa

SEQ ID NO: 718 - RNA, 22 nt, Artificial Sequence
  Synthetic sequence
ucaggggugggggacgcuguau

SEQ ID NO: 719 - RNA, 22 nt, Artificial Sequence
  Synthetic sequence
uccaaagauacagcguccccca

SEQ ID NO: 720 - RNA, 22 nt, Artificial Sequence
  Synthetic sequence
ugggggacgcuguaucuuugga

SEQ ID NO: 721 - RNA, 22 nt, Artificial Sequence
  Synthetic sequence
uucaggggugggggacgcugua

SEQ ID NO: 722 - RNA, 22 nt, Artificial Sequence
  Synthetic sequence
uuccaaagauacagcguccccc

SEQ ID NO: 723 - RNA, 22 nt, Artificial Sequence
  Synthetic sequence
uuucaggggugggggacgcugu

SEQ ID NO: 724 - RNA, 21 nt, Artificial Sequence
  Synthetic sequence
acgucaggacuccagccuggc

SEQ ID NO: 725 - RNA, 21 nt, Artificial Sequence
  Synthetic sequence
acuugccuguggucacgucag

SEQ ID NO: 726 - RNA, 21 nt, Artificial Sequence
  Synthetic sequence
agagccugggccaggcuggag

SEQ ID NO: 727 - RNA, 21 nt, Artificial Sequence
  Synthetic sequence
agccugggccaggcuggaguc

SEQ ID NO: 728 - RNA, 21 nt, Artificial Sequence
  Synthetic sequence
aggacuccagccuggcccagg

SEQ ID NO: 729 - RNA, 21 nt, Artificial Sequence
  Synthetic sequence
aggcuggaguccugacgugac

SEQ ID NO: 730 - RNA, 21 nt, Artificial Sequence
  Synthetic sequence
aguccugacgugaccacaggc

SEQ ID NO: 731 - RNA, 21 nt, Artificial Sequence
  Synthetic sequence
cacgucaggacuccagccugg

SEQ ID NO: 732 - RNA, 21 nt, Artificial Sequence
  Synthetic sequence
cacuugccuguggucacguca

SEQ ID NO: 733 - RNA, 21 nt, Artificial Sequence
  Synthetic sequence
cagagccugggccaggcugga

SEQ ID NO: 734 - RNA, 21 nt, Artificial Sequence
  Synthetic sequence
caggacuccagccuggcccag

SEQ ID NO: 735 - RNA, 21 nt, Artificial Sequence
  Synthetic sequence
caggcuggaguccugacguga

SEQ ID NO: 736 - RNA, 21 nt, Artificial Sequence
  Synthetic sequence
ccacuugccuguggucacguc

SEQ ID NO: 737 - RNA, 21 nt, Artificial Sequence
  Synthetic sequence
ccaggcuggaguccugacgug

SEQ ID NO: 738 - RNA, 21 nt, Artificial Sequence
  Synthetic sequence
ccugacgugaccacaggcaag

SEQ ID NO: 739 - RNA, 21 nt, Artificial Sequence
  Synthetic sequence
ccugggccaggcuggaguccu

SEQ ID NO: 740 - RNA, 21 nt, Artificial Sequence
  Synthetic sequence
ccuguggucacgucaggacuc

SEQ ID NO: 741 - RNA, 21 nt, Artificial Sequence
  Synthetic sequence
cgucaggacuccagccuggcc

SEQ ID NO: 742 - RNA, 21 nt, Artificial Sequence
  Synthetic sequence
cuggaguccugacgugaccac

SEQ ID NO: 743 - RNA, 21 nt, Artificial Sequence
  Synthetic sequence
cugggccaggcuggaguccug

SEQ ID NO: 744 - RNA, 21 nt, Artificial Sequence
  Synthetic sequence
cuguggucacgucaggacucc

SEQ ID NO: 745 - RNA, 21 nt, Artificial Sequence
  Synthetic sequence
cuugccuguggucacgucagg

SEQ ID NO: 746 - RNA, 21 nt, Artificial Sequence
  Synthetic sequence
gagccugggccaggcuggagu

SEQ ID NO: 747 - RNA, 21 nt, Artificial Sequence
  Synthetic sequence
gaguccugacgugaccacagg

SEQ ID NO: 748 - RNA, 21 nt, Artificial Sequence
  Synthetic sequence
gccaggcuggaguccugacgu

SEQ ID NO: 749 - RNA, 21 nt, Artificial Sequence
  Synthetic sequence
gccugggccaggcuggagucc

SEQ ID NO: 750 - RNA, 21 nt, Artificial Sequence
  Synthetic sequence
gccuguggucacgucaggacu

SEQ ID NO: 751 - RNA, 21 nt, Artificial Sequence
  Synthetic sequence
gcuggaguccugacgugacca

SEQ ID NO: 752 - RNA, 21 nt, Artificial Sequence
  Synthetic sequence
ggaguccugacgugaccacag

SEQ ID NO: 753 - RNA, 21 nt, Artificial Sequence
  Synthetic sequence
ggccaggcuggaguccugacg

SEQ ID NO: 754 - RNA, 21 nt, Artificial Sequence
  Synthetic sequence
ggcuggaguccugacgugacc

SEQ ID NO: 755 - RNA, 21 nt, Artificial Sequence
  Synthetic sequence
gggccaggcuggaguccugac

SEQ ID NO: 756 - RNA, 21 nt, Artificial Sequence
  Synthetic sequence
ggucacgucaggacuccagcc

SEQ ID NO: 757 - RNA, 21 nt, Artificial Sequence
  Synthetic sequence
gucacgucaggacuccagccu

SEQ ID NO: 758 - RNA, 21 nt, Artificial Sequence
  Synthetic sequence
gucaggacuccagccuggccc

SEQ ID NO: 759 - RNA, 21 nt, Artificial Sequence
  Synthetic sequence
guccacuugccuguggucacg

SEQ ID NO: 760 - RNA, 21 nt, Artificial Sequence
  Synthetic sequence
guccugacgugaccacaggca

SEQ ID NO: 761 - RNA, 21 nt, Artificial Sequence
  Synthetic sequence
guggucacgucaggacuccag

SEQ ID NO: 762 - RNA, 21 nt, Artificial Sequence
  Synthetic sequence
ucacgucaggacuccagccug

SEQ ID NO: 763 - RNA, 21 nt, Artificial Sequence
  Synthetic sequence
ucaggacuccagccuggccca

SEQ ID NO: 764 - RNA, 21 nt, Artificial Sequence
  Synthetic sequence
uccacuugccuguggucacgu

SEQ ID NO: 765 - RNA, 21 nt, Artificial Sequence
  Synthetic sequence
uccugacgugaccacaggcaa

SEQ ID NO: 766 - RNA, 21 nt, Artificial Sequence
  Synthetic sequence
ugccuguggucacgucaggac

SEQ ID NO: 767 - RNA, 21 nt, Artificial Sequence
  Synthetic sequence
uggaguccugacgugaccaca

SEQ ID NO: 768 - RNA, 21 nt, Artificial Sequence
  Synthetic sequence
ugggccaggcuggaguccuga

SEQ ID NO: 769 - RNA, 21 nt, Artificial Sequence
  Synthetic sequence
uggucacgucaggacuccagc

SEQ ID NO: 770 - RNA, 21 nt, Artificial Sequence
  Synthetic sequence
uguggucacgucaggacucca

SEQ ID NO: 771 - RNA, 21 nt, Artificial Sequence
  Synthetic sequence
uugccuguggucacgucagga

SEQ ID NO: 772 - RNA, 22 nt, Artificial Sequence
  Synthetic sequence
acgucaggacuccagccuggcc

SEQ ID NO: 773 - RNA, 22 nt, Artificial Sequence
  Synthetic sequence
acuugccuguggucacgucagg

SEQ ID NO: 774 - RNA, 22 nt, Artificial Sequence
  Synthetic sequence
agagccugggccaggcuggagu

SEQ ID NO: 775 - RNA, 22 nt, Artificial Sequence
  Synthetic sequence
agccugggccaggcuggagucc

SEQ ID NO: 776 - RNA, 22 nt, Artificial Sequence
  Synthetic sequence
aggacuccagccuggcccaggc

SEQ ID NO: 777 - RNA, 22 nt, Artificial Sequence
  Synthetic sequence
aggcuggaguccugacgugacc

SEQ ID NO: 778 - RNA, 22 nt, Artificial Sequence
  Synthetic sequence
aguccugacgugaccacaggca

SEQ ID NO: 779 - RNA, 22 nt, Artificial Sequence
  Synthetic sequence
cacgucaggacuccagccuggc

SEQ ID NO: 780 - RNA, 22 nt, Artificial Sequence
  Synthetic sequence
cacuugccuguggucacgucag

SEQ ID NO: 781 - RNA, 22 nt, Artificial Sequence
  Synthetic sequence
cagagccugggccaggcuggag

SEQ ID NO: 782 - RNA, 22 nt, Artificial Sequence
  Synthetic sequence
caggacuccagccuggcccagg

SEQ ID NO: 783 - RNA, 22 nt, Artificial Sequence
  Synthetic sequence
caggcuggaguccugacgugac

SEQ ID NO: 784 - RNA, 22 nt, Artificial Sequence
  Synthetic sequence
ccacuugccuguggucacguca

SEQ ID NO: 785 - RNA, 22 nt, Artificial Sequence
  Synthetic sequence
ccaggcuggaguccugacguga

SEQ ID NO: 786 - RNA, 22 nt, Artificial Sequence
  Synthetic sequence
ccugacgugaccacaggcaagu

SEQ ID NO: 787 - RNA, 22 nt, Artificial Sequence
  Synthetic sequence
ccugggccaggcuggaguccug

SEQ ID NO: 788 - RNA, 22 nt, Artificial Sequence
  Synthetic sequence
ccuguggucacgucaggacucc

SEQ ID NO: 789 - RNA, 22 nt, Artificial Sequence
  Synthetic sequence
cgucaggacuccagccuggccc

SEQ ID NO: 790 - RNA, 22 nt, Artificial Sequence
  Synthetic sequence
cuggaguccugacgugaccaca

SEQ ID NO: 791 - RNA, 22 nt, Artificial Sequence
  Synthetic sequence
cugggccaggcuggaguccuga

SEQ ID NO: 792 - RNA, 22 nt, Artificial Sequence
  Synthetic sequence
cuguggucacgucaggacucca

SEQ ID NO: 793 - RNA, 22 nt, Artificial Sequence
  Synthetic sequence
cuugccuguggucacgucagga

SEQ ID NO: 794 - RNA, 22 nt, Artificial Sequence
  Synthetic sequence
gagccugggccaggcuggaguc

SEQ ID NO: 795 - RNA, 22 nt, Artificial Sequence
  Synthetic sequence
gaguccugacgugaccacaggc

SEQ ID NO: 796 - RNA, 22 nt, Artificial Sequence
  Synthetic sequence
gcagagccugggccaggcugga

SEQ ID NO: 797 - RNA, 22 nt, Artificial Sequence
  Synthetic sequence
gccaggcuggaguccugacgug

SEQ ID NO: 798 - RNA, 22 nt, Artificial Sequence
  Synthetic sequence
gccugggccaggcuggaguccu

SEQ ID NO: 799 - RNA, 22 nt, Artificial Sequence
  Synthetic sequence
gccuguggucacgucaggacuc

SEQ ID NO: 800 - RNA, 22 nt, Artificial Sequence
  Synthetic sequence
gcuggaguccugacgugaccac

SEQ ID NO: 801 - RNA, 22 nt, Artificial Sequence
  Synthetic sequence
ggaguccugacgugaccacagg

SEQ ID NO: 802 - RNA, 22 nt, Artificial Sequence
  Synthetic sequence
ggccaggcuggaguccugacgu

SEQ ID NO: 803 - RNA, 22 nt, Artificial Sequence
  Synthetic sequence
ggcuggaguccugacgugacca

SEQ ID NO: 804 - RNA, 22 nt, Artificial Sequence
  Synthetic sequence
gggccaggcuggaguccugacg

SEQ ID NO: 805 - RNA, 22 nt, Artificial Sequence
  Synthetic sequence
ggucacgucaggacuccagccu

SEQ ID NO: 806 - RNA, 22 nt, Artificial Sequence
  Synthetic sequence
gguccacuugccuguggucacg

SEQ ID NO: 807 - RNA, 22 nt, Artificial Sequence
  Synthetic sequence
gucacgucaggacuccagccug

SEQ ID NO: 808 - RNA, 22 nt, Artificial Sequence
  Synthetic sequence
gucaggacuccagccuggccca

SEQ ID NO: 809 - RNA, 22 nt, Artificial Sequence
  Synthetic sequence
guccacuugccuguggucacgu

SEQ ID NO: 810 - RNA, 22 nt, Artificial Sequence
  Synthetic sequence
guccugacgugaccacaggcaa

SEQ ID NO: 811 - RNA, 22 nt, Artificial Sequence
  Synthetic sequence
guggucacgucaggacuccagc

SEQ ID NO: 812 - RNA, 22 nt, Artificial Sequence
  Synthetic sequence
ucacgucaggacuccagccugg

SEQ ID NO: 813 - RNA, 22 nt, Artificial Sequence
  Synthetic sequence
ucaggacuccagccuggcccag

SEQ ID NO: 814 - RNA, 22 nt, Artificial Sequence
  Synthetic sequence
uccacuugccuguggucacguc

SEQ ID NO: 815 - RNA, 22 nt, Artificial Sequence
  Synthetic sequence
uccugacgugaccacaggcaag

SEQ ID NO: 816 - RNA, 22 nt, Artificial Sequence
  Synthetic sequence
ugccuguggucacgucaggacu

SEQ ID NO: 817 - RNA, 22 nt, Artificial Sequence
  Synthetic sequence
uggaguccugacgugaccacag

SEQ ID NO: 818 - RNA, 22 nt, Artificial Sequence
  Synthetic sequence
ugggccaggcuggaguccugac

SEQ ID NO: 819 - RNA, 22 nt, Artificial Sequence
  Synthetic sequence
uggucacgucaggacuccagcc

SEQ ID NO: 820 - RNA, 22 nt, Artificial Sequence
  Synthetic sequence
uguggucacgucaggacuccag

SEQ ID NO: 821 - RNA, 22 nt, Artificial Sequence
  Synthetic sequence
uugccuguggucacgucaggac

SEQ ID NO: 822 - RNA, 21 nt, Artificial Sequence
  Synthetic sequence
aagacuccagccuggcccagg

SEQ ID NO: 823 - RNA, 21 nt, Artificial Sequence
  Synthetic sequence
acgucaagacuccagccuggc

SEQ ID NO: 824 - RNA, 21 nt, Artificial Sequence
  Synthetic sequence
acuugccuguggucacgucaa

SEQ ID NO: 825 - RNA, 21 nt, Artificial Sequence
  Synthetic sequence
aggcuggagucuugacgugac

SEQ ID NO: 826 - RNA, 21 nt, Artificial Sequence
  Synthetic sequence
agucuugacgugaccacaggc

SEQ ID NO: 827 - RNA, 21 nt, Artificial Sequence
  Synthetic sequence
caagacuccagccuggcccag

SEQ ID NO: 828 - RNA, 21 nt, Artificial Sequence
  Synthetic sequence
cacgucaagacuccagccugg

SEQ ID NO: 829 - RNA, 21 nt, Artificial Sequence
  Synthetic sequence
caggcuggagucuugacguga

SEQ ID NO: 830 - RNA, 21 nt, Artificial Sequence
  Synthetic sequence
ccaggcuggagucuugacgug

SEQ ID NO: 831 - RNA, 21 nt, Artificial Sequence
  Synthetic sequence
ccugggccaggcuggagucuu

SEQ ID NO: 832 - RNA, 21 nt, Artificial Sequence
  Synthetic sequence
ccuguggucacgucaagacuc

SEQ ID NO: 833 - RNA, 21 nt, Artificial Sequence
  Synthetic sequence
cgucaagacuccagccuggcc

SEQ ID NO: 834 - RNA, 21 nt, Artificial Sequence
  Synthetic sequence
cuggagucuugacgugaccac

SEQ ID NO: 835 - RNA, 21 nt, Artificial Sequence
  Synthetic sequence
cugggccaggcuggagucuug

SEQ ID NO: 836 - RNA, 21 nt, Artificial Sequence
  Synthetic sequence
cuguggucacgucaagacucc

SEQ ID NO: 837 - RNA, 21 nt, Artificial Sequence
  Synthetic sequence
cuugacgugaccacaggcaag

SEQ ID NO: 838 - RNA, 21 nt, Artificial Sequence
  Synthetic sequence
cuugccuguggucacgucaag

SEQ ID NO: 839 - RNA, 21 nt, Artificial Sequence
  Synthetic sequence
gagucuugacgugaccacagg

SEQ ID NO: 840 - RNA, 21 nt, Artificial Sequence
  Synthetic sequence
gccaggcuggagucuugacgu

SEQ ID NO: 841 - RNA, 21 nt, Artificial Sequence
  Synthetic sequence
gccugggccaggcuggagucu

SEQ ID NO: 842 - RNA, 21 nt, Artificial Sequence
  Synthetic sequence
gccuguggucacgucaagacu

SEQ ID NO: 843 - RNA, 21 nt, Artificial Sequence
  Synthetic sequence
gcuggagucuugacgugacca

SEQ ID NO: 844 - RNA, 21 nt, Artificial Sequence
  Synthetic sequence
ggagucuugacgugaccacag

SEQ ID NO: 845 - RNA, 21 nt, Artificial Sequence
  Synthetic sequence
ggccaggcuggagucuugacg

SEQ ID NO: 846 - RNA, 21 nt, Artificial Sequence
  Synthetic sequence
ggcuggagucuugacgugacc

SEQ ID NO: 847 - RNA, 21 nt, Artificial Sequence
  Synthetic sequence
gggccaggcuggagucuugac

SEQ ID NO: 848 - RNA, 21 nt, Artificial Sequence
  Synthetic sequence
ggucacgucaagacuccagcc

SEQ ID NO: 849 - RNA, 21 nt, Artificial Sequence
  Synthetic sequence
gucaagacuccagccuggccc

SEQ ID NO: 850 - RNA, 21 nt, Artificial Sequence
  Synthetic sequence
gucacgucaagacuccagccu

SEQ ID NO: 851 - RNA, 21 nt, Artificial Sequence
  Synthetic sequence
gucuugacgugaccacaggca

SEQ ID NO: 852 - RNA, 21 nt, Artificial Sequence
  Synthetic sequence
guggucacgucaagacuccag

SEQ ID NO: 853 - RNA, 21 nt, Artificial Sequence
  Synthetic sequence
ucaagacuccagccuggccca

SEQ ID NO: 854 - RNA, 21 nt, Artificial Sequence
  Synthetic sequence
ucacgucaagacuccagccug

SEQ ID NO: 855 - RNA, 21 nt, Artificial Sequence
  Synthetic sequence
ucuugacgugaccacaggcaa

SEQ ID NO: 856 - RNA, 21 nt, Artificial Sequence
  Synthetic sequence
ugccuguggucacgucaagac

SEQ ID NO: 857 - RNA, 21 nt, Artificial Sequence
  Synthetic sequence
uggagucuugacgugaccaca

SEQ ID NO: 858 - RNA, 21 nt, Artificial Sequence
  Synthetic sequence
ugggccaggcuggagucuuga

SEQ ID NO: 859 - RNA, 21 nt, Artificial Sequence
  Synthetic sequence
uggucacgucaagacuccagc

SEQ ID NO: 860 - RNA, 21 nt, Artificial Sequence
  Synthetic sequence
uguggucacgucaagacucca

SEQ ID NO: 861 - RNA, 21 nt, Artificial Sequence
  Synthetic sequence
uugccuguggucacgucaaga

SEQ ID NO: 862 - RNA, 22 nt, Artificial Sequence
  Synthetic sequence
aagacuccagccuggcccaggc

SEQ ID NO: 863 - RNA, 22 nt, Artificial Sequence
  Synthetic sequence
acgucaagacuccagccuggcc

SEQ ID NO: 864 - RNA, 22 nt, Artificial Sequence
  Synthetic sequence
acuugccuguggucacgucaag

SEQ ID NO: 865 - RNA, 22 nt, Artificial Sequence
  Synthetic sequence
agccugggccaggcuggagucu

SEQ ID NO: 866 - RNA, 22 nt, Artificial Sequence
  Synthetic sequence
aggcuggagucuugacgugacc

SEQ ID NO: 867 - RNA, 22 nt, Artificial Sequence
  Synthetic sequence
agucuugacgugaccacaggca

SEQ ID NO: 868 - RNA, 22 nt, Artificial Sequence
  Synthetic sequence
caagacuccagccuggcccagg

SEQ ID NO: 869 - RNA, 22 nt, Artificial Sequence
  Synthetic sequence
cacgucaagacuccagccuggc

SEQ ID NO: 870 - RNA, 22 nt, Artificial Sequence
  Synthetic sequence
cacuugccuguggucacgucaa

SEQ ID NO: 871 - RNA, 22 nt, Artificial Sequence
  Synthetic sequence
caggcuggagucuugacgugac

SEQ ID NO: 872 - RNA, 22 nt, Artificial Sequence
  Synthetic sequence
ccaggcuggagucuugacguga

SEQ ID NO: 873 - RNA, 22 nt, Artificial Sequence
  Synthetic sequence
ccugggccaggcuggagucuug

SEQ ID NO: 874 - RNA, 22 nt, Artificial Sequence
  Synthetic sequence
ccuguggucacgucaagacucc

SEQ ID NO: 875 - RNA, 22 nt, Artificial Sequence
  Synthetic sequence
cgucaagacuccagccuggccc

SEQ ID NO: 876 - RNA, 22 nt, Artificial Sequence
  Synthetic sequence
cuggagucuugacgugaccaca

SEQ ID NO: 877 - RNA, 22 nt, Artificial Sequence
  Synthetic sequence
cugggccaggcuggagucuuga

SEQ ID NO: 878 - RNA, 22 nt, Artificial Sequence
  Synthetic sequence
cuguggucacgucaagacucca

SEQ ID NO: 879 - RNA, 22 nt, Artificial Sequence
  Synthetic sequence
cuugacgugaccacaggcaagu

SEQ ID NO: 880 - RNA, 22 nt, Artificial Sequence
  Synthetic sequence
cuugccuguggucacgucaaga

SEQ ID NO: 881 - RNA, 22 nt, Artificial Sequence
  Synthetic sequence
gagucuugacgugaccacaggc

SEQ ID NO: 882 - RNA, 22 nt, Artificial Sequence
  Synthetic sequence
gccaggcuggagucuugacgug

SEQ ID NO: 883 - RNA, 22 nt, Artificial Sequence
  Synthetic sequence
gccugggccaggcuggagucuu

SEQ ID NO: 884 - RNA, 22 nt, Artificial Sequence
  Synthetic sequence
gccuguggucacgucaagacuc

SEQ ID NO: 885 - RNA, 22 nt, Artificial Sequence
  Synthetic sequence
gcuggagucuugacgugaccac

SEQ ID NO: 886 - RNA, 22 nt, Artificial Sequence
  Synthetic sequence
ggagucuugacgugaccacagg

SEQ ID NO: 887 - RNA, 22 nt, Artificial Sequence
  Synthetic sequence
ggccaggcuggagucuugacgu

SEQ ID NO: 888 - RNA, 22 nt, Artificial Sequence
  Synthetic sequence
ggcuggagucuugacgugacca

SEQ ID NO: 889 - RNA, 22 nt, Artificial Sequence
  Synthetic sequence
gggccaggcuggagucuugacg

SEQ ID NO: 890 - RNA, 22 nt, Artificial Sequence
  Synthetic sequence
ggucacgucaagacuccagccu

SEQ ID NO: 891 - RNA, 22 nt, Artificial Sequence
  Synthetic sequence
gucaagacuccagccuggccca

SEQ ID NO: 892 - RNA, 22 nt, Artificial Sequence
  Synthetic sequence
gucacgucaagacuccagccug

SEQ ID NO: 893 - RNA, 22 nt, Artificial Sequence
  Synthetic sequence
gucuugacgugaccacaggcaa

SEQ ID NO: 894 - RNA, 22 nt, Artificial Sequence
  Synthetic sequence
guggucacgucaagacuccagc

SEQ ID NO: 895 - RNA, 22 nt, Artificial Sequence
  Synthetic sequence
ucaagacuccagccuggcccag

SEQ ID NO: 896 - RNA, 22 nt, Artificial Sequence
  Synthetic sequence
ucacgucaagacuccagccugg

SEQ ID NO: 897 - RNA, 22 nt, Artificial Sequence
  Synthetic sequence
ucuugacgugaccacaggcaag

SEQ ID NO: 898 - RNA, 22 nt, Artificial Sequence
  Synthetic sequence
ugccuguggucacgucaagacu

SEQ ID NO: 899 - RNA, 22 nt, Artificial Sequence
  Synthetic sequence
uggagucuugacgugaccacag

SEQ ID NO: 900 - RNA, 22 nt, Artificial Sequence
  Synthetic sequence
ugggccaggcuggagucuugac

SEQ ID NO: 901 - RNA, 22 nt, Artificial Sequence
  Synthetic sequence
uggucacgucaagacuccagcc

SEQ ID NO: 902 - RNA, 22 nt, Artificial Sequence
  Synthetic sequence
uguggucacgucaagacuccag

SEQ ID NO: 903 - RNA, 22 nt, Artificial Sequence
  Synthetic sequence
uugccuguggucacgucaagac

SEQ ID NO: 904 - RNA, 21 nt, Artificial Sequence
  Synthetic sequence
aacaucgugggggagauggga

SEQ ID NO: 905 - RNA, 21 nt, Artificial Sequence
  Synthetic sequence
acaucgugggggagaugggaa

SEQ ID NO: 906 - RNA, 21 nt, Artificial Sequence
  Synthetic sequence
acgauguuccagcugcaacgg

SEQ ID NO: 907 - RNA, 21 nt, Artificial Sequence
  Synthetic sequence
agcuggaacaucgugggggag

SEQ ID NO: 908 - RNA, 21 nt, Artificial Sequence
  Synthetic sequence
aucgugggggagaugggaaga

SEQ ID NO: 909 - RNA, 21 nt, Artificial Sequence
  Synthetic sequence
aucucccccacgauguuccag

SEQ ID NO: 910 - RNA, 21 nt, Artificial Sequence
  Synthetic sequence
cacgauguuccagcugcaacg

SEQ ID NO: 911 - RNA, 21 nt, Artificial Sequence
  Synthetic sequence
cagcuggaacaucguggggga

SEQ ID NO: 912 - RNA, 21 nt, Artificial Sequence
  Synthetic sequence
caucgugggggagaugggaag

SEQ ID NO: 913 - RNA, 21 nt, Artificial Sequence
  Synthetic sequence
caucucccccacgauguucca

SEQ ID NO: 914 - RNA, 21 nt, Artificial Sequence
  Synthetic sequence
ccacgauguuccagcugcaac

SEQ ID NO: 915 - RNA, 21 nt, Artificial Sequence
  Synthetic sequence
ccaucucccccacgauguucc

SEQ ID NO: 916 - RNA, 21 nt, Artificial Sequence
  Synthetic sequence
cccacgauguuccagcugcaa

SEQ ID NO: 917 - RNA, 21 nt, Artificial Sequence
  Synthetic sequence
cccaucucccccacgauguuc

SEQ ID NO: 918 - RNA, 21 nt, Artificial Sequence
  Synthetic sequence
ccccacgauguuccagcugca

SEQ ID NO: 919 - RNA, 21 nt, Artificial Sequence
  Synthetic sequence
cccccacgauguuccagcugc

SEQ ID NO: 920 - RNA, 21 nt, Artificial Sequence
  Synthetic sequence
cccggccguugcagcuggaac

SEQ ID NO: 921 - RNA, 21 nt, Artificial Sequence
  Synthetic sequence
ccggccguugcagcuggaaca

SEQ ID NO: 922 - RNA, 21 nt, Artificial Sequence
  Synthetic sequence
ccguugcagcuggaacaucgu

SEQ ID NO: 923 - RNA, 21 nt, Artificial Sequence
  Synthetic sequence
ccucuucccaucucccccacg

SEQ ID NO: 924 - RNA, 21 nt, Artificial Sequence
  Synthetic sequence
cgauguuccagcugcaacggc

SEQ ID NO: 925 - RNA, 21 nt, Artificial Sequence
  Synthetic sequence
cggccguugcagcuggaacau

SEQ ID NO: 926 - RNA, 21 nt, Artificial Sequence
  Synthetic sequence
cguuccucuucccaucucccc

SEQ ID NO: 927 - RNA, 21 nt, Artificial Sequence
  Synthetic sequence
cguugcagcuggaacaucgug

SEQ ID NO: 928 - RNA, 21 nt, Artificial Sequence
  Synthetic sequence
cucccccacgauguuccagcu

SEQ ID NO: 929 - RNA, 21 nt, Artificial Sequence
  Synthetic sequence
cucuucccaucucccccacga

SEQ ID NO: 930 - RNA, 21 nt, Artificial Sequence
  Synthetic sequence
cuggaacaucgugggggagau

SEQ ID NO: 931 - RNA, 21 nt, Artificial Sequence
  Synthetic sequence
cuucccaucucccccacgaug

SEQ ID NO: 932 - RNA, 21 nt, Artificial Sequence
  Synthetic sequence
gaacaucgugggggagauggg

SEQ ID NO: 933 - RNA, 21 nt, Artificial Sequence
  Synthetic sequence
gcagcuggaacaucguggggg

SEQ ID NO: 934 - RNA, 21 nt, Artificial Sequence
  Synthetic sequence
gcccggccguugcagcuggaa

SEQ ID NO: 935 - RNA, 21 nt, Artificial Sequence
  Synthetic sequence
gccguugcagcuggaacaucg

SEQ ID NO: 936 - RNA, 21 nt, Artificial Sequence
  Synthetic sequence
gcuggaacaucgugggggaga

SEQ ID NO: 937 - RNA, 21 nt, Artificial Sequence
  Synthetic sequence
ggaacaucgugggggagaugg

SEQ ID NO: 938 - RNA, 21 nt, Artificial Sequence
  Synthetic sequence
ggccguugcagcuggaacauc

SEQ ID NO: 939 - RNA, 21 nt, Artificial Sequence
  Synthetic sequence
guuccucuucccaucuccccc

SEQ ID NO: 940 - RNA, 21 nt, Artificial Sequence
  Synthetic sequence
guugcagcuggaacaucgugg

SEQ ID NO: 941 - RNA, 21 nt, Artificial Sequence
  Synthetic sequence
ucccaucucccccacgauguu

SEQ ID NO: 942 - RNA, 21 nt, Artificial Sequence
  Synthetic sequence
ucccccacgauguuccagcug

SEQ ID NO: 943 - RNA, 21 nt, Artificial Sequence
  Synthetic sequence
uccucuucccaucucccccac

SEQ ID NO: 944 - RNA, 21 nt, Artificial Sequence
  Synthetic sequence
ucgugggggagaugggaagag

SEQ ID NO: 945 - RNA, 21 nt, Artificial Sequence
  Synthetic sequence
ucucccccacgauguuccagc

SEQ ID NO: 946 - RNA, 21 nt, Artificial Sequence
  Synthetic sequence
ucuucccaucucccccacgau

SEQ ID NO: 947 - RNA, 21 nt, Artificial Sequence
  Synthetic sequence
ugcagcuggaacaucgugggg

SEQ ID NO: 948 - RNA, 21 nt, Artificial Sequence
  Synthetic sequence
uggaacaucgugggggagaug

SEQ ID NO: 949 - RNA, 21 nt, Artificial Sequence
  Synthetic sequence
uucccaucucccccacgaugu

SEQ ID NO: 950 - RNA, 21 nt, Artificial Sequence
  Synthetic sequence
uuccucuucccaucuccccca

SEQ ID NO: 951 - RNA, 21 nt, Artificial Sequence
  Synthetic sequence
uugcagcuggaacaucguggg

SEQ ID NO: 952 - RNA, 22 nt, Artificial Sequence
  Synthetic sequence
aacaucgugggggagaugggaa

SEQ ID NO: 953 - RNA, 22 nt, Artificial Sequence
  Synthetic sequence
acaucgugggggagaugggaag

SEQ ID NO: 954 - RNA, 22 nt, Artificial Sequence
  Synthetic sequence
acgauguuccagcugcaacggc

SEQ ID NO: 955 - RNA, 22 nt, Artificial Sequence
  Synthetic sequence
agcuggaacaucgugggggaga

SEQ ID NO: 956 - RNA, 22 nt, Artificial Sequence
  Synthetic sequence
aucgugggggagaugggaagag

SEQ ID NO: 957 - RNA, 22 nt, Artificial Sequence
  Synthetic sequence
aucucccccacgauguuccagc

SEQ ID NO: 958 - RNA, 22 nt, Artificial Sequence
  Synthetic sequence
cacgauguuccagcugcaacgg

SEQ ID NO: 959 - RNA, 22 nt, Artificial Sequence
  Synthetic sequence
cagcuggaacaucgugggggag

SEQ ID NO: 960 - RNA, 22 nt, Artificial Sequence
  Synthetic sequence
caucgugggggagaugggaaga

SEQ ID NO: 961 - RNA, 22 nt, Artificial Sequence
  Synthetic sequence
caucucccccacgauguuccag

SEQ ID NO: 962 - RNA, 22 nt, Artificial Sequence
  Synthetic sequence
ccacgauguuccagcugcaacg

SEQ ID NO: 963 - RNA, 22 nt, Artificial Sequence
  Synthetic sequence
ccaucucccccacgauguucca

SEQ ID NO: 964 - RNA, 22 nt, Artificial Sequence
  Synthetic sequence
cccacgauguuccagcugcaac

SEQ ID NO: 965 - RNA, 22 nt, Artificial Sequence
  Synthetic sequence
cccaucucccccacgauguucc

SEQ ID NO: 966 - RNA, 22 nt, Artificial Sequence
  Synthetic sequence
ccccacgauguuccagcugcaa

SEQ ID NO: 967 - RNA, 22 nt, Artificial Sequence
  Synthetic sequence
cccccacgauguuccagcugca

SEQ ID NO: 968 - RNA, 22 nt, Artificial Sequence
  Synthetic sequence
cccggccguugcagcuggaaca

SEQ ID NO: 969 - RNA, 22 nt, Artificial Sequence
  Synthetic sequence
ccggccguugcagcuggaacau

SEQ ID NO: 970 - RNA, 22 nt, Artificial Sequence
  Synthetic sequence
ccguuccucuucccaucucccc

SEQ ID NO: 971 - RNA, 22 nt, Artificial Sequence
  Synthetic sequence
ccguugcagcuggaacaucgug

SEQ ID NO: 972 - RNA, 22 nt, Artificial Sequence
  Synthetic sequence
ccucuucccaucucccccacga

SEQ ID NO: 973 - RNA, 22 nt, Artificial Sequence
  Synthetic sequence
cgauguuccagcugcaacggcc

SEQ ID NO: 974 - RNA, 22 nt, Artificial Sequence
  Synthetic sequence
cggccguugcagcuggaacauc

SEQ ID NO: 975 - RNA, 22 nt, Artificial Sequence
  Synthetic sequence
cguuccucuucccaucuccccc

SEQ ID NO: 976 - RNA, 22 nt, Artificial Sequence
  Synthetic sequence
cguugcagcuggaacaucgugg

SEQ ID NO: 977 - RNA, 22 nt, Artificial Sequence
  Synthetic sequence
cucccccacgauguuccagcug

SEQ ID NO: 978 - RNA, 22 nt, Artificial Sequence
  Synthetic sequence
cucuucccaucucccccacgau

SEQ ID NO: 979 - RNA, 22 nt, Artificial Sequence
  Synthetic sequence
cuggaacaucgugggggagaug

SEQ ID NO: 980 - RNA, 22 nt, Artificial Sequence
  Synthetic sequence
cuucccaucucccccacgaugu

SEQ ID NO: 981 - RNA, 22 nt, Artificial Sequence
  Synthetic sequence
gaacaucgugggggagauggga

SEQ ID NO: 982 - RNA, 22 nt, Artificial Sequence
  Synthetic sequence
gcagcuggaacaucguggggga

SEQ ID NO: 983 - RNA, 22 nt, Artificial Sequence
  Synthetic sequence
gcccggccguugcagcuggaac

SEQ ID NO: 984 - RNA, 22 nt, Artificial Sequence
  Synthetic sequence
gccguugcagcuggaacaucgu

SEQ ID NO: 985 - RNA, 22 nt, Artificial Sequence
  Synthetic sequence
gcuggaacaucgugggggagau

SEQ ID NO: 986 - RNA, 22 nt, Artificial Sequence
  Synthetic sequence
ggaacaucgugggggagauggg

SEQ ID NO: 987 - RNA, 22 nt, Artificial Sequence
  Synthetic sequence
ggcccggccguugcagcuggaa

SEQ ID NO: 988 - RNA, 22 nt, Artificial Sequence
  Synthetic sequence
ggccguugcagcuggaacaucg

SEQ ID NO: 989 - RNA, 22 nt, Artificial Sequence
  Synthetic sequence
guuccucuucccaucuccccca

SEQ ID NO: 990 - RNA, 22 nt, Artificial Sequence
  Synthetic sequence
guugcagcuggaacaucguggg

SEQ ID NO: 991 - RNA, 22 nt, Artificial Sequence
  Synthetic sequence
ucccaucucccccacgauguuc

SEQ ID NO: 992 - RNA, 22 nt, Artificial Sequence
  Synthetic sequence
ucccccacgauguuccagcugc

SEQ ID NO: 993 - RNA, 22 nt, Artificial Sequence
  Synthetic sequence
uccucuucccaucucccccacg

SEQ ID NO: 994 - RNA, 22 nt, Artificial Sequence
  Synthetic sequence
ucgugggggagaugggaagagg

SEQ ID NO: 995 - RNA, 22 nt, Artificial Sequence
  Synthetic sequence
ucucccccacgauguuccagcu

SEQ ID NO: 996 - RNA, 22 nt, Artificial Sequence
  Synthetic sequence
ucuucccaucucccccacgaug

SEQ ID NO: 997 - RNA, 22 nt, Artificial Sequence
  Synthetic sequence
ugcagcuggaacaucguggggg

SEQ ID NO: 998 - RNA, 22 nt, Artificial Sequence
  Synthetic sequence
uggaacaucgugggggagaugg

SEQ ID NO: 999 - RNA, 22 nt, Artificial Sequence
  Synthetic sequence
uucccaucucccccacgauguu

SEQ ID NO: 1000 - RNA, 22 nt, Artificial Sequence
  Synthetic sequence
uuccucuucccaucucccccac

SEQ ID NO: 1001 - RNA, 22 nt, Artificial Sequence
  Synthetic sequence
uugcagcuggaacaucgugggg

SEQ ID NO: 1002 - RNA, 21 nt, Artificial Sequence
  Synthetic sequence
aacauggugggggagauggga

SEQ ID NO: 1003 - RNA, 21 nt, Artificial Sequence
  Synthetic sequence
acauggugggggagaugggaa

SEQ ID NO: 1004 - RNA, 21 nt, Artificial Sequence
  Synthetic sequence
accauguuccagcugcaacgg

SEQ ID NO: 1005 - RNA, 21 nt, Artificial Sequence
  Synthetic sequence
agcuggaacauggugggggag

SEQ ID NO: 1006 - RNA, 21 nt, Artificial Sequence
  Synthetic sequence
aucucccccaccauguuccag

SEQ ID NO: 1007 - RNA, 21 nt, Artificial Sequence
  Synthetic sequence
auggugggggagaugggaaga

SEQ ID NO: 1008 - RNA, 21 nt, Artificial Sequence
  Synthetic sequence
caccauguuccagcugcaacg

SEQ ID NO: 1009 - RNA, 21 nt, Artificial Sequence
  Synthetic sequence
cagcuggaacaugguggggga

SEQ ID NO: 1010 - RNA, 21 nt, Artificial Sequence
  Synthetic sequence
caucucccccaccauguucca

SEQ ID NO: 1011 - RNA, 21 nt, Artificial Sequence
  Synthetic sequence
cauggugggggagaugggaag

SEQ ID NO: 1012 - RNA, 21 nt, Artificial Sequence
  Synthetic sequence
ccaccauguuccagcugcaac

SEQ ID NO: 1013 - RNA, 21 nt, Artificial Sequence
  Synthetic sequence
ccaucucccccaccauguucc

SEQ ID NO: 1014 - RNA, 21 nt, Artificial Sequence
  Synthetic sequence
ccauguuccagcugcaacggc

SEQ ID NO: 1015 - RNA, 21 nt, Artificial Sequence
  Synthetic sequence
cccaccauguuccagcugcaa

SEQ ID NO: 1016 - RNA, 21 nt, Artificial Sequence
  Synthetic sequence
cccaucucccccaccauguuc

SEQ ID NO: 1017 - RNA, 21 nt, Artificial Sequence
  Synthetic sequence
ccccaccauguuccagcugca

SEQ ID NO: 1018 - RNA, 21 nt, Artificial Sequence
  Synthetic sequence
cccccaccauguuccagcugc

SEQ ID NO: 1019 - RNA, 21 nt, Artificial Sequence
  Synthetic sequence
ccguugcagcuggaacauggu

SEQ ID NO: 1020 - RNA, 21 nt, Artificial Sequence
  Synthetic sequence
ccucuucccaucucccccacc

SEQ ID NO: 1021 - RNA, 21 nt, Artificial Sequence
  Synthetic sequence
cguugcagcuggaacauggug

SEQ ID NO: 1022 - RNA, 21 nt, Artificial Sequence
  Synthetic sequence
cucccccaccauguuccagcu

SEQ ID NO: 1023 - RNA, 21 nt, Artificial Sequence
  Synthetic sequence
cucuucccaucucccccacca

SEQ ID NO: 1024 - RNA, 21 nt, Artificial Sequence
  Synthetic sequence
cuggaacauggugggggagau

SEQ ID NO: 1025 - RNA, 21 nt, Artificial Sequence
  Synthetic sequence
cuucccaucucccccaccaug

SEQ ID NO: 1026 - RNA, 21 nt, Artificial Sequence
  Synthetic sequence
gaacauggugggggagauggg

SEQ ID NO: 1027 - RNA, 21 nt, Artificial Sequence
  Synthetic sequence
gcagcuggaacaugguggggg

SEQ ID NO: 1028 - RNA, 21 nt, Artificial Sequence
  Synthetic sequence
gccguugcagcuggaacaugg

SEQ ID NO: 1029 - RNA, 21 nt, Artificial Sequence
  Synthetic sequence
gcuggaacauggugggggaga

SEQ ID NO: 1030 - RNA, 21 nt, Artificial Sequence
  Synthetic sequence
ggaacauggugggggagaugg

SEQ ID NO: 1031 - RNA, 21 nt, Artificial Sequence
  Synthetic sequence
ggccguugcagcuggaacaug

SEQ ID NO: 1032 - RNA, 21 nt, Artificial Sequence
  Synthetic sequence
guugcagcuggaacauggugg

SEQ ID NO: 1033 - RNA, 21 nt, Artificial Sequence
  Synthetic sequence
ucccaucucccccaccauguu

SEQ ID NO: 1034 - RNA, 21 nt, Artificial Sequence
  Synthetic sequence
ucccccaccauguuccagcug

SEQ ID NO: 1035 - RNA, 21 nt, Artificial Sequence
  Synthetic sequence
ucucccccaccauguuccagc

SEQ ID NO: 1036 - RNA, 21 nt, Artificial Sequence
  Synthetic sequence
ucuucccaucucccccaccau

SEQ ID NO: 1037 - RNA, 21 nt, Artificial Sequence
  Synthetic sequence
ugcagcuggaacauggugggg

SEQ ID NO: 1038 - RNA, 21 nt, Artificial Sequence
  Synthetic sequence
uggaacauggugggggagaug

SEQ ID NO: 1039 - RNA, 21 nt, Artificial Sequence
  Synthetic sequence
uggugggggagaugggaagag

SEQ ID NO: 1040 - RNA, 21 nt, Artificial Sequence
  Synthetic sequence
uucccaucucccccaccaugu

SEQ ID NO: 1041 - RNA, 21 nt, Artificial Sequence
  Synthetic sequence
uugcagcuggaacaugguggg

SEQ ID NO: 1042 - RNA, 22 nt, Artificial Sequence
  Synthetic sequence
aacauggugggggagaugggaa

SEQ ID NO: 1043 - RNA, 22 nt, Artificial Sequence
  Synthetic sequence
acauggugggggagaugggaag

SEQ ID NO: 1044 - RNA, 22 nt, Artificial Sequence
  Synthetic sequence
accauguuccagcugcaacggc

SEQ ID NO: 1045 - RNA, 22 nt, Artificial Sequence
  Synthetic sequence
agcuggaacauggugggggaga

SEQ ID NO: 1046 - RNA, 22 nt, Artificial Sequence
  Synthetic sequence
aucucccccaccauguuccagc

SEQ ID NO: 1047 - RNA, 22 nt, Artificial Sequence
  Synthetic sequence
auggugggggagaugggaagag

SEQ ID NO: 1048 - RNA, 22 nt, Artificial Sequence
  Synthetic sequence
caccauguuccagcugcaacgg

SEQ ID NO: 1049 - RNA, 22 nt, Artificial Sequence
  Synthetic sequence
cagcuggaacauggugggggag

SEQ ID NO: 1050 - RNA, 22 nt, Artificial Sequence
  Synthetic sequence
caucucccccaccauguuccag

SEQ ID NO: 1051 - RNA, 22 nt, Artificial Sequence
  Synthetic sequence
cauggugggggagaugggaaga

SEQ ID NO: 1052 - RNA, 22 nt, Artificial Sequence
  Synthetic sequence
ccaccauguuccagcugcaacg

SEQ ID NO: 1053 - RNA, 22 nt, Artificial Sequence
  Synthetic sequence
ccaucucccccaccauguucca

SEQ ID NO: 1054 - RNA, 22 nt, Artificial Sequence
  Synthetic sequence
ccauguuccagcugcaacggcc

SEQ ID NO: 1055 - RNA, 22 nt, Artificial Sequence
  Synthetic sequence
cccaccauguuccagcugcaac

SEQ ID NO: 1056 - RNA, 22 nt, Artificial Sequence
  Synthetic sequence
cccaucucccccaccauguucc

SEQ ID NO: 1057 - RNA, 22 nt, Artificial Sequence
  Synthetic sequence
ccccaccauguuccagcugcaa

SEQ ID NO: 1058 - RNA, 22 nt, Artificial Sequence
  Synthetic sequence
cccccaccauguuccagcugca

SEQ ID NO: 1059 - RNA, 22 nt, Artificial Sequence
  Synthetic sequence
ccguugcagcuggaacauggug

SEQ ID NO: 1060 - RNA, 22 nt, Artificial Sequence
  Synthetic sequence
ccucuucccaucucccccacca

SEQ ID NO: 1061 - RNA, 22 nt, Artificial Sequence
  Synthetic sequence
cggccguugcagcuggaacaug

SEQ ID NO: 1062 - RNA, 22 nt, Artificial Sequence
  Synthetic sequence
cguugcagcuggaacauggugg

SEQ ID NO: 1063 - RNA, 22 nt, Artificial Sequence
  Synthetic sequence
cucccccaccauguuccagcug

SEQ ID NO: 1064 - RNA, 22 nt, Artificial Sequence
  Synthetic sequence
cucuucccaucucccccaccau

SEQ ID NO: 1065 - RNA, 22 nt, Artificial Sequence
  Synthetic sequence
cuggaacauggugggggagaug

SEQ ID NO: 1066 - RNA, 22 nt, Artificial Sequence
  Synthetic sequence
cuucccaucucccccaccaugu

SEQ ID NO: 1067 - RNA, 22 nt, Artificial Sequence
  Synthetic sequence
gaacauggugggggagauggga

SEQ ID NO: 1068 - RNA, 22 nt, Artificial Sequence
  Synthetic sequence
gcagcuggaacaugguggggga

SEQ ID NO: 1069 - RNA, 22 nt, Artificial Sequence
  Synthetic sequence
gccguugcagcuggaacauggu

SEQ ID NO: 1070 - RNA, 22 nt, Artificial Sequence
  Synthetic sequence
gcuggaacauggugggggagau

SEQ ID NO: 1071 - RNA, 22 nt, Artificial Sequence
  Synthetic sequence
ggaacauggugggggagauggg

SEQ ID NO: 1072 - RNA, 22 nt, Artificial Sequence
  Synthetic sequence
ggccguugcagcuggaacaugg

SEQ ID NO: 1073 - RNA, 22 nt, Artificial Sequence
  Synthetic sequence
guugcagcuggaacaugguggg

SEQ ID NO: 1074 - RNA, 22 nt, Artificial Sequence
  Synthetic sequence
ucccaucucccccaccauguuc

SEQ ID NO: 1075 - RNA, 22 nt, Artificial Sequence
  Synthetic sequence
ucccccaccauguuccagcugc

SEQ ID NO: 1076 - RNA, 22 nt, Artificial Sequence
  Synthetic sequence
uccucuucccaucucccccacc

SEQ ID NO: 1077 - RNA, 22 nt, Artificial Sequence
  Synthetic sequence
ucucccccaccauguuccagcu

SEQ ID NO: 1078 - RNA, 22 nt, Artificial Sequence
  Synthetic sequence
ucuucccaucucccccaccaug

SEQ ID NO: 1079 - RNA, 22 nt, Artificial Sequence
  Synthetic sequence
ugcagcuggaacaugguggggg

SEQ ID NO: 1080 - RNA, 22 nt, Artificial Sequence
  Synthetic sequence
uggaacauggugggggagaugg

SEQ ID NO: 1081 - RNA, 22 nt, Artificial Sequence
  Synthetic sequence
uggugggggagaugggaagagg

SEQ ID NO: 1082 - RNA, 22 nt, Artificial Sequence
  Synthetic sequence
uucccaucucccccaccauguu

SEQ ID NO: 1083 - RNA, 22 nt, Artificial Sequence
  Synthetic sequence
uugcagcuggaacauggugggg

SEQ ID NO: 1084 - RNA, 21 nt, Artificial Sequence
  Synthetic sequence
aaagggauucccaggacccag

SEQ ID NO: 1085 - RNA, 21 nt, Artificial Sequence
  Synthetic sequence
aagggauucccaggacccagc

SEQ ID NO: 1086 - RNA, 21 nt, Artificial Sequence
  Synthetic sequence
aaucccuuucccgcagcuggg

SEQ ID NO: 1087 - RNA, 21 nt, Artificial Sequence
  Synthetic sequence
agcugcgggaaagggauuccc

SEQ ID NO: 1088 - RNA, 21 nt, Artificial Sequence
  Synthetic sequence
agcuggagucccagcugcggg

SEQ ID NO: 1089 - RNA, 21 nt, Artificial Sequence
  Synthetic sequence
agucccagcugcgggaaaggg

SEQ ID NO: 1090 - RNA, 21 nt, Artificial Sequence
  Synthetic sequence
aucccuuucccgcagcuggga

SEQ ID NO: 1091 - RNA, 21 nt, Artificial Sequence
  Synthetic sequence
cagcugcgggaaagggauucc

SEQ ID NO: 1092 - RNA, 21 nt, Artificial Sequence
  Synthetic sequence
ccagcugcgggaaagggauuc

SEQ ID NO: 1093 - RNA, 21 nt, Artificial Sequence
  Synthetic sequence
cccagcugcgggaaagggauu

SEQ ID NO: 1094 - RNA, 21 nt, Artificial Sequence
  Synthetic sequence
cccuuucccgcagcugggacu

SEQ ID NO: 1095 - RNA, 21 nt, Artificial Sequence
  Synthetic sequence
ccggggcuggguccugggaau

SEQ ID NO: 1096 - RNA, 21 nt, Artificial Sequence
  Synthetic sequence
ccugggaaucccuuucccgca

SEQ ID NO: 1097 - RNA, 21 nt, Artificial Sequence
  Synthetic sequence
ccuuucccgcagcugggacuc

SEQ ID NO: 1098 - RNA, 21 nt, Artificial Sequence
  Synthetic sequence
cgggaaagggauucccaggac

SEQ ID NO: 1099 - RNA, 21 nt, Artificial Sequence
  Synthetic sequence
cggggcuggguccugggaauc

SEQ ID NO: 1100 - RNA, 21 nt, Artificial Sequence
  Synthetic sequence
cugcgggaaagggauucccag

SEQ ID NO: 1101 - RNA, 21 nt, Artificial Sequence
  Synthetic sequence
cuggagucccagcugcgggaa

SEQ ID NO: 1102 - RNA, 21 nt, Artificial Sequence
  Synthetic sequence
cugggaaucccuuucccgcag

SEQ ID NO: 1103 - RNA, 21 nt, Artificial Sequence
  Synthetic sequence
cuggguccugggaaucccuuu

SEQ ID NO: 1104 - RNA, 21 nt, Artificial Sequence
  Synthetic sequence
cuuucccgcagcugggacucc

SEQ ID NO: 1105 - RNA, 21 nt, Artificial Sequence
  Synthetic sequence
gaaagggauucccaggaccca

SEQ ID NO: 1106 - RNA, 21 nt, Artificial Sequence
  Synthetic sequence
gaaucccuuucccgcagcugg

SEQ ID NO: 1107 - RNA, 21 nt, Artificial Sequence
  Synthetic sequence
gagcuggagucccagcugcgg

SEQ ID NO: 1108 - RNA, 21 nt, Artificial Sequence
  Synthetic sequence
gagucccagcugcgggaaagg

SEQ ID NO: 1109 - RNA, 21 nt, Artificial Sequence
  Synthetic sequence
gcgggaaagggauucccagga

SEQ ID NO: 1110 - RNA, 21 nt, Artificial Sequence
  Synthetic sequence
gcugcgggaaagggauuccca

SEQ ID NO: 1111 - RNA, 21 nt, Artificial Sequence
  Synthetic sequence
gcuggagucccagcugcggga

SEQ ID NO: 1112 - RNA, 21 nt, Artificial Sequence
  Synthetic sequence
gcuggguccugggaaucccuu

SEQ ID NO: 1113 - RNA, 21 nt, Artificial Sequence
  Synthetic sequence
ggaaagggauucccaggaccc

SEQ ID NO: 1114 - RNA, 21 nt, Artificial Sequence
  Synthetic sequence
ggaaucccuuucccgcagcug

SEQ ID NO: 1115 - RNA, 21 nt, Artificial Sequence
  Synthetic sequence
ggagucccagcugcgggaaag

SEQ ID NO: 1116 - RNA, 21 nt, Artificial Sequence
  Synthetic sequence
ggcuggguccugggaaucccu

SEQ ID NO: 1117 - RNA, 21 nt, Artificial Sequence
  Synthetic sequence
gggaaagggauucccaggacc

SEQ ID NO: 1118 - RNA, 21 nt, Artificial Sequence
  Synthetic sequence
gggaaucccuuucccgcagcu

SEQ ID NO: 1119 - RNA, 21 nt, Artificial Sequence
  Synthetic sequence
gggcuggguccugggaauccc

SEQ ID NO: 1120 - RNA, 21 nt, Artificial Sequence
  Synthetic sequence
ggggcuggguccugggaaucc

SEQ ID NO: 1121 - RNA, 21 nt, Artificial Sequence
  Synthetic sequence
ggguccugggaaucccuuucc

SEQ ID NO: 1122 - RNA, 21 nt, Artificial Sequence
  Synthetic sequence
gguccugggaaucccuuuccc

SEQ ID NO: 1123 - RNA, 21 nt, Artificial Sequence
  Synthetic sequence
gucccagcugcgggaaaggga

SEQ ID NO: 1124 - RNA, 21 nt, Artificial Sequence
  Synthetic sequence
guccugggaaucccuuucccg

SEQ ID NO: 1125 - RNA, 21 nt, Artificial Sequence
  Synthetic sequence
ucccagcugcgggaaagggau

SEQ ID NO: 1126 - RNA, 21 nt, Artificial Sequence
  Synthetic sequence
ucccuuucccgcagcugggac

SEQ ID NO: 1127 - RNA, 21 nt, Artificial Sequence
  Synthetic sequence
uccugggaaucccuuucccgc

SEQ ID NO: 1128 - RNA, 21 nt, Artificial Sequence
  Synthetic sequence
ugcgggaaagggauucccagg

SEQ ID NO: 1129 - RNA, 21 nt, Artificial Sequence
  Synthetic sequence
uggagucccagcugcgggaaa

SEQ ID NO: 1130 - RNA, 21 nt, Artificial Sequence
  Synthetic sequence
ugggaaucccuuucccgcagc

SEQ ID NO: 1131 - RNA, 21 nt, Artificial Sequence
  Synthetic sequence
uggguccugggaaucccuuuc

SEQ ID NO: 1132 - RNA, 22 nt, Artificial Sequence
  Synthetic sequence
aaagggauucccaggacccagc

SEQ ID NO: 1133 - RNA, 22 nt, Artificial Sequence
  Synthetic sequence
aagggauucccaggacccagcc

SEQ ID NO: 1134 - RNA, 22 nt, Artificial Sequence
  Synthetic sequence
aaucccuuucccgcagcuggga

SEQ ID NO: 1135 - RNA, 22 nt, Artificial Sequence
  Synthetic sequence
agcugcgggaaagggauuccca

SEQ ID NO: 1136 - RNA, 22 nt, Artificial Sequence
  Synthetic sequence
agcuggagucccagcugcggga

SEQ ID NO: 1137 - RNA, 22 nt, Artificial Sequence
  Synthetic sequence
agucccagcugcgggaaaggga

SEQ ID NO: 1138 - RNA, 22 nt, Artificial Sequence
  Synthetic sequence
aucccuuucccgcagcugggac

SEQ ID NO: 1139 - RNA, 22 nt, Artificial Sequence
  Synthetic sequence
cagcugcgggaaagggauuccc

SEQ ID NO: 1140 - RNA, 22 nt, Artificial Sequence
  Synthetic sequence
ccagcugcgggaaagggauucc

SEQ ID NO: 1141 - RNA, 22 nt, Artificial Sequence
  Synthetic sequence
cccagcugcgggaaagggauuc

SEQ ID NO: 1142 - RNA, 22 nt, Artificial Sequence
  Synthetic sequence
cccggggcuggguccugggaau

SEQ ID NO: 1143 - RNA, 22 nt, Artificial Sequence
  Synthetic sequence
cccuuucccgcagcugggacuc

SEQ ID NO: 1144 - RNA, 22 nt, Artificial Sequence
  Synthetic sequence
ccggggcuggguccugggaauc

SEQ ID NO: 1145 - RNA, 22 nt, Artificial Sequence
  Synthetic sequence
ccugggaaucccuuucccgcag

SEQ ID NO: 1146 - RNA, 22 nt, Artificial Sequence
  Synthetic sequence
ccuuucccgcagcugggacucc

SEQ ID NO: 1147 - RNA, 22 nt, Artificial Sequence
  Synthetic sequence
cgggaaagggauucccaggacc

SEQ ID NO: 1148 - RNA, 22 nt, Artificial Sequence
  Synthetic sequence
cggggcuggguccugggaaucc

SEQ ID NO: 1149 - RNA, 22 nt, Artificial Sequence
  Synthetic sequence
cugcgggaaagggauucccagg

SEQ ID NO: 1150 - RNA, 22 nt, Artificial Sequence
  Synthetic sequence
cuggagucccagcugcgggaaa

SEQ ID NO: 1151 - RNA, 22 nt, Artificial Sequence
  Synthetic sequence
cugggaaucccuuucccgcagc

SEQ ID NO: 1152 - RNA, 22 nt, Artificial Sequence
  Synthetic sequence
cuggguccugggaaucccuuuc

SEQ ID NO: 1153 - RNA, 22 nt, Artificial Sequence
  Synthetic sequence
cuuucccgcagcugggacucca

SEQ ID NO: 1154 - RNA, 22 nt, Artificial Sequence
  Synthetic sequence
gaaagggauucccaggacccag

SEQ ID NO: 1155 - RNA, 22 nt, Artificial Sequence
  Synthetic sequence
gaaucccuuucccgcagcuggg

SEQ ID NO: 1156 - RNA, 22 nt, Artificial Sequence
  Synthetic sequence
gagcuggagucccagcugcggg

SEQ ID NO: 1157 - RNA, 22 nt, Artificial Sequence
  Synthetic sequence
gagucccagcugcgggaaaggg

SEQ ID NO: 1158 - RNA, 22 nt, Artificial Sequence
  Synthetic sequence
gcgggaaagggauucccaggac

SEQ ID NO: 1159 - RNA, 22 nt, Artificial Sequence
  Synthetic sequence
gcugcgggaaagggauucccag

SEQ ID NO: 1160 - RNA, 22 nt, Artificial Sequence
  Synthetic sequence
gcuggagucccagcugcgggaa

SEQ ID NO: 1161 - RNA, 22 nt, Artificial Sequence
  Synthetic sequence
gcuggguccugggaaucccuuu

SEQ ID NO: 1162 - RNA, 22 nt, Artificial Sequence
  Synthetic sequence
ggaaagggauucccaggaccca

SEQ ID NO: 1163 - RNA, 22 nt, Artificial Sequence
  Synthetic sequence
ggaaucccuuucccgcagcugg

SEQ ID NO: 1164 - RNA, 22 nt, Artificial Sequence
  Synthetic sequence
ggagcuggagucccagcugcgg

SEQ ID NO: 1165 - RNA, 22 nt, Artificial Sequence
  Synthetic sequence
ggagucccagcugcgggaaagg

SEQ ID NO: 1166 - RNA, 22 nt, Artificial Sequence
  Synthetic sequence
ggcuggguccugggaaucccuu

SEQ ID NO: 1167 - RNA, 22 nt, Artificial Sequence
  Synthetic sequence
gggaaagggauucccaggaccc

SEQ ID NO: 1168 - RNA, 22 nt, Artificial Sequence
  Synthetic sequence
gggaaucccuuucccgcagcug

SEQ ID NO: 1169 - RNA, 22 nt, Artificial Sequence
  Synthetic sequence
gggcuggguccugggaaucccu

SEQ ID NO: 1170 - RNA, 22 nt, Artificial Sequence
  Synthetic sequence
ggggcuggguccugggaauccc

SEQ ID NO: 1171 - RNA, 22 nt, Artificial Sequence
  Synthetic sequence
ggguccugggaaucccuuuccc

SEQ ID NO: 1172 - RNA, 22 nt, Artificial Sequence
  Synthetic sequence
gguccugggaaucccuuucccg

SEQ ID NO: 1173 - RNA, 22 nt, Artificial Sequence
  Synthetic sequence
gucccagcugcgggaaagggau

SEQ ID NO: 1174 - RNA, 22 nt, Artificial Sequence
  Synthetic sequence
guccugggaaucccuuucccgc

SEQ ID NO: 1175 - RNA, 22 nt, Artificial Sequence
  Synthetic sequence
ucccagcugcgggaaagggauu

SEQ ID NO: 1176 - RNA, 22 nt, Artificial Sequence
  Synthetic sequence
ucccuuucccgcagcugggacu

SEQ ID NO: 1177 - RNA, 22 nt, Artificial Sequence
  Synthetic sequence
uccugggaaucccuuucccgca

SEQ ID NO: 1178 - RNA, 22 nt, Artificial Sequence
  Synthetic sequence
ugcgggaaagggauucccagga

SEQ ID NO: 1179 - RNA, 22 nt, Artificial Sequence
  Synthetic sequence
uggagucccagcugcgggaaag

SEQ ID NO: 1180 - RNA, 22 nt, Artificial Sequence
  Synthetic sequence
ugggaaucccuuucccgcagcu

SEQ ID NO: 1181 - RNA, 22 nt, Artificial Sequence
  Synthetic sequence
uggguccugggaaucccuuucc

SEQ ID NO: 1182 - RNA, 21 nt, Artificial Sequence
  Synthetic sequence
aaucccauucccgcagcuggg

SEQ ID NO: 1183 - RNA, 21 nt, Artificial Sequence
  Synthetic sequence
aaugggauucccaggacccag

SEQ ID NO: 1184 - RNA, 21 nt, Artificial Sequence
  Synthetic sequence
agcugcgggaaugggauuccc

SEQ ID NO: 1185 - RNA, 21 nt, Artificial Sequence
  Synthetic sequence
agucccagcugcgggaauggg

SEQ ID NO: 1186 - RNA, 21 nt, Artificial Sequence
  Synthetic sequence
aucccauucccgcagcuggga

SEQ ID NO: 1187 - RNA, 21 nt, Artificial Sequence
  Synthetic sequence
augggauucccaggacccagc

SEQ ID NO: 1188 - RNA, 21 nt, Artificial Sequence
  Synthetic sequence
cagcugcgggaaugggauucc

SEQ ID NO: 1189 - RNA, 21 nt, Artificial Sequence
  Synthetic sequence
cauucccgcagcugggacucc

SEQ ID NO: 1190 - RNA, 21 nt, Artificial Sequence
  Synthetic sequence
ccagcugcgggaaugggauuc

SEQ ID NO: 1191 - RNA, 21 nt, Artificial Sequence
  Synthetic sequence
ccauucccgcagcugggacuc

SEQ ID NO: 1192 - RNA, 21 nt, Artificial Sequence
  Synthetic sequence
cccagcugcgggaaugggauu

SEQ ID NO: 1193 - RNA, 21 nt, Artificial Sequence
  Synthetic sequence
cccauucccgcagcugggacu

SEQ ID NO: 1194 - RNA, 21 nt, Artificial Sequence
  Synthetic sequence
ccugggaaucccauucccgca

SEQ ID NO: 1195 - RNA, 21 nt, Artificial Sequence
  Synthetic sequence
cgggaaugggauucccaggac

SEQ ID NO: 1196 - RNA, 21 nt, Artificial Sequence
  Synthetic sequence
cugcgggaaugggauucccag

SEQ ID NO: 1197 - RNA, 21 nt, Artificial Sequence
  Synthetic sequence
cugggaaucccauucccgcag

SEQ ID NO: 1198 - RNA, 21 nt, Artificial Sequence
  Synthetic sequence
cuggguccugggaaucccauu

SEQ ID NO: 1199 - RNA, 21 nt, Artificial Sequence
  Synthetic sequence
gaaucccauucccgcagcugg

SEQ ID NO: 1200 - RNA, 21 nt, Artificial Sequence
  Synthetic sequence
gaaugggauucccaggaccca

SEQ ID NO: 1201 - RNA, 21 nt, Artificial Sequence
  Synthetic sequence
gagucccagcugcgggaaugg

SEQ ID NO: 1202 - RNA, 21 nt, Artificial Sequence
  Synthetic sequence
gcgggaaugggauucccagga

SEQ ID NO: 1203 - RNA, 21 nt, Artificial Sequence
  Synthetic sequence
gcugcgggaaugggauuccca

SEQ ID NO: 1204 - RNA, 21 nt, Artificial Sequence
  Synthetic sequence
gcuggguccugggaaucccau

SEQ ID NO: 1205 - RNA, 21 nt, Artificial Sequence
  Synthetic sequence
ggaaucccauucccgcagcug

SEQ ID NO: 1206 - RNA, 21 nt, Artificial Sequence
  Synthetic sequence
ggaaugggauucccaggaccc

SEQ ID NO: 1207 - RNA, 21 nt, Artificial Sequence
  Synthetic sequence
ggagucccagcugcgggaaug

SEQ ID NO: 1208 - RNA, 21 nt, Artificial Sequence
  Synthetic sequence
ggcuggguccugggaauccca

SEQ ID NO: 1209 - RNA, 21 nt, Artificial Sequence
  Synthetic sequence
gggaaucccauucccgcagcu

SEQ ID NO: 1210 - RNA, 21 nt, Artificial Sequence
  Synthetic sequence
gggaaugggauucccaggacc

SEQ ID NO: 1211 - RNA, 21 nt, Artificial Sequence
  Synthetic sequence
ggguccugggaaucccauucc

SEQ ID NO: 1212 - RNA, 21 nt, Artificial Sequence
  Synthetic sequence
gguccugggaaucccauuccc

SEQ ID NO: 1213 - RNA, 21 nt, Artificial Sequence
  Synthetic sequence
gucccagcugcgggaauggga

SEQ ID NO: 1214 - RNA, 21 nt, Artificial Sequence
  Synthetic sequence
guccugggaaucccauucccg

SEQ ID NO: 1215 - RNA, 21 nt, Artificial Sequence
  Synthetic sequence
ucccagcugcgggaaugggau

SEQ ID NO: 1216 - RNA, 21 nt, Artificial Sequence
  Synthetic sequence
ucccauucccgcagcugggac

SEQ ID NO: 1217 - RNA, 21 nt, Artificial Sequence
  Synthetic sequence
uccugggaaucccauucccgc

SEQ ID NO: 1218 - RNA, 21 nt, Artificial Sequence
  Synthetic sequence
ugcgggaaugggauucccagg

SEQ ID NO: 1219 - RNA, 21 nt, Artificial Sequence
  Synthetic sequence
uggagucccagcugcgggaau

SEQ ID NO: 1220 - RNA, 21 nt, Artificial Sequence
  Synthetic sequence
ugggaaucccauucccgcagc

SEQ ID NO: 1221 - RNA, 21 nt, Artificial Sequence
  Synthetic sequence
uggguccugggaaucccauuc

SEQ ID NO: 1222 - RNA, 22 nt, Artificial Sequence
  Synthetic sequence
aaucccauucccgcagcuggga

SEQ ID NO: 1223 - RNA, 22 nt, Artificial Sequence
  Synthetic sequence
aaugggauucccaggacccagc

SEQ ID NO: 1224 - RNA, 22 nt, Artificial Sequence
  Synthetic sequence
agcugcgggaaugggauuccca

SEQ ID NO: 1225 - RNA, 22 nt, Artificial Sequence
  Synthetic sequence
agucccagcugcgggaauggga

SEQ ID NO: 1226 - RNA, 22 nt, Artificial Sequence
  Synthetic sequence
aucccauucccgcagcugggac

SEQ ID NO: 1227 - RNA, 22 nt, Artificial Sequence
  Synthetic sequence
augggauucccaggacccagcc

SEQ ID NO: 1228 - RNA, 22 nt, Artificial Sequence
  Synthetic sequence
cagcugcgggaaugggauuccc

SEQ ID NO: 1229 - RNA, 22 nt, Artificial Sequence
  Synthetic sequence
cauucccgcagcugggacucca

SEQ ID NO: 1230 - RNA, 22 nt, Artificial Sequence
  Synthetic sequence
ccagcugcgggaaugggauucc

SEQ ID NO: 1231 - RNA, 22 nt, Artificial Sequence
  Synthetic sequence
ccauucccgcagcugggacucc

SEQ ID NO: 1232 - RNA, 22 nt, Artificial Sequence
  Synthetic sequence
cccagcugcgggaaugggauuc

SEQ ID NO: 1233 - RNA, 22 nt, Artificial Sequence
  Synthetic sequence
cccauucccgcagcugggacuc

SEQ ID NO: 1234 - RNA, 22 nt, Artificial Sequence
  Synthetic sequence
ccugggaaucccauucccgcag

SEQ ID NO: 1235 - RNA, 22 nt, Artificial Sequence
  Synthetic sequence
cgggaaugggauucccaggacc

SEQ ID NO: 1236 - RNA, 22 nt, Artificial Sequence
  Synthetic sequence
cugcgggaaugggauucccagg

SEQ ID NO: 1237 - RNA, 22 nt, Artificial Sequence
  Synthetic sequence
cuggagucccagcugcgggaau

SEQ ID NO: 1238 - RNA, 22 nt, Artificial Sequence
  Synthetic sequence
cugggaaucccauucccgcagc

SEQ ID NO: 1239 - RNA, 22 nt, Artificial Sequence
  Synthetic sequence
cuggguccugggaaucccauuc

SEQ ID NO: 1240 - RNA, 22 nt, Artificial Sequence
  Synthetic sequence
gaaucccauucccgcagcuggg

SEQ ID NO: 1241 - RNA, 22 nt, Artificial Sequence
  Synthetic sequence
gaaugggauucccaggacccag

SEQ ID NO: 1242 - RNA, 22 nt, Artificial Sequence
  Synthetic sequence
gagucccagcugcgggaauggg

SEQ ID NO: 1243 - RNA, 22 nt, Artificial Sequence
  Synthetic sequence
gcgggaaugggauucccaggac

SEQ ID NO: 1244 - RNA, 22 nt, Artificial Sequence
  Synthetic sequence
gcugcgggaaugggauucccag

SEQ ID NO: 1245 - RNA, 22 nt, Artificial Sequence
  Synthetic sequence
gcuggguccugggaaucccauu

SEQ ID NO: 1246 - RNA, 22 nt, Artificial Sequence
  Synthetic sequence
ggaaucccauucccgcagcugg

SEQ ID NO: 1247 - RNA, 22 nt, Artificial Sequence
  Synthetic sequence
ggaaugggauucccaggaccca

SEQ ID NO: 1248 - RNA, 22 nt, Artificial Sequence
  Synthetic sequence
ggagucccagcugcgggaaugg

SEQ ID NO: 1249 - RNA, 22 nt, Artificial Sequence
  Synthetic sequence
ggcuggguccugggaaucccau

SEQ ID NO: 1250 - RNA, 22 nt, Artificial Sequence
  Synthetic sequence
gggaaucccauucccgcagcug

SEQ ID NO: 1251 - RNA, 22 nt, Artificial Sequence
  Synthetic sequence
gggaaugggauucccaggaccc

SEQ ID NO: 1252 - RNA, 22 nt, Artificial Sequence
  Synthetic sequence
gggcuggguccugggaauccca

SEQ ID NO: 1253 - RNA, 22 nt, Artificial Sequence
  Synthetic sequence
ggguccugggaaucccauuccc

SEQ ID NO: 1254 - RNA, 22 nt, Artificial Sequence
  Synthetic sequence
gguccugggaaucccauucccg

SEQ ID NO: 1255 - RNA, 22 nt, Artificial Sequence
  Synthetic sequence
gucccagcugcgggaaugggau

SEQ ID NO: 1256 - RNA, 22 nt, Artificial Sequence
  Synthetic sequence
guccugggaaucccauucccgc

SEQ ID NO: 1257 - RNA, 22 nt, Artificial Sequence
  Synthetic sequence
ucccagcugcgggaaugggauu

SEQ ID NO: 1258 - RNA, 22 nt, Artificial Sequence
  Synthetic sequence
ucccauucccgcagcugggacu

SEQ ID NO: 1259 - RNA, 22 nt, Artificial Sequence
  Synthetic sequence
uccugggaaucccauucccgca

SEQ ID NO: 1260 - RNA, 22 nt, Artificial Sequence
  Synthetic sequence
ugcgggaaugggauucccagga

SEQ ID NO: 1261 - RNA, 22 nt, Artificial Sequence
  Synthetic sequence
uggagucccagcugcgggaaug

SEQ ID NO: 1262 - RNA, 22 nt, Artificial Sequence
  Synthetic sequence
ugggaaucccauucccgcagcu

SEQ ID NO: 1263 - RNA, 22 nt, Artificial Sequence
  Synthetic sequence
uggguccugggaaucccauucc

SEQ ID NO: 1264 - RNA, 21 nt, Artificial Sequence
  Synthetic sequence
acacagcugcauguggccggu

SEQ ID NO: 1265 - RNA, 21 nt, Artificial Sequence
  Synthetic sequence
acagcugcauguggccgguag

SEQ ID NO: 1266 - RNA, 21 nt, Artificial Sequence
  Synthetic sequence
acccagggcccugugcuaccg

SEQ ID NO: 1267 - RNA, 21 nt, Artificial Sequence
  Synthetic sequence
agcacagggcccuggguaaac

SEQ ID NO: 1268 - RNA, 21 nt, Artificial Sequence
  Synthetic sequence
agcugcauguggccgguagca

SEQ ID NO: 1269 - RNA, 21 nt, Artificial Sequence
  Synthetic sequence
agggcccugugcuaccggcca

SEQ ID NO: 1270 - RNA, 21 nt, Artificial Sequence
  Synthetic sequence
aguuuacccagggcccugugc

SEQ ID NO: 1271 - RNA, 21 nt, Artificial Sequence
  Synthetic sequence
auguggccgguagcacagggc

SEQ ID NO: 1272 - RNA, 21 nt, Artificial Sequence
  Synthetic sequence
cacagcugcauguggccggua

SEQ ID NO: 1273 - RNA, 21 nt, Artificial Sequence
  Synthetic sequence
cagcugcauguggccgguagc

SEQ ID NO: 1274 - RNA, 21 nt, Artificial Sequence
  Synthetic sequence
cagggcccugugcuaccggcc

SEQ ID NO: 1275 - RNA, 21 nt, Artificial Sequence
  Synthetic sequence
caguuuacccagggcccugug

SEQ ID NO: 1276 - RNA, 21 nt, Artificial Sequence
  Synthetic sequence
cauguggccgguagcacaggg

SEQ ID NO: 1277 - RNA, 21 nt, Artificial Sequence
  Synthetic sequence
ccagggcccugugcuaccggc

SEQ ID NO: 1278 - RNA, 21 nt, Artificial Sequence
  Synthetic sequence
cccagggcccugugcuaccgg

SEQ ID NO: 1279 - RNA, 21 nt, Artificial Sequence
  Synthetic sequence
cccugugcuaccggccacaug

SEQ ID NO: 1280 - RNA, 21 nt, Artificial Sequence
  Synthetic sequence
ccgguagcacagggcccuggg

SEQ ID NO: 1281 - RNA, 21 nt, Artificial Sequence
  Synthetic sequence
ccucaguuuacccagggcccu

SEQ ID NO: 1282 - RNA, 21 nt, Artificial Sequence
  Synthetic sequence
ccugugcuaccggccacaugc

SEQ ID NO: 1283 - RNA, 21 nt, Artificial Sequence
  Synthetic sequence
cgacacagcugcauguggccg

SEQ ID NO: 1284 - RNA, 21 nt, Artificial Sequence
  Synthetic sequence
cgguagcacagggcccugggu

SEQ ID NO: 1285 - RNA, 21 nt, Artificial Sequence
  Synthetic sequence
cucaguuuacccagggcccug

SEQ ID NO: 1286 - RNA, 21 nt, Artificial Sequence
  Synthetic sequence
cugcauguggccgguagcaca

SEQ ID NO: 1287 - RNA, 21 nt, Artificial Sequence
  Synthetic sequence
cugugcuaccggccacaugca

SEQ ID NO: 1288 - RNA, 21 nt, Artificial Sequence
  Synthetic sequence
gacacagcugcauguggccgg

SEQ ID NO: 1289 - RNA, 21 nt, Artificial Sequence
  Synthetic sequence
gcauguggccgguagcacagg

SEQ ID NO: 1290 - RNA, 21 nt, Artificial Sequence
  Synthetic sequence
gcccugugcuaccggccacau

SEQ ID NO: 1291 - RNA, 21 nt, Artificial Sequence
  Synthetic sequence
gccgguagcacagggcccugg

SEQ ID NO: 1292 - RNA, 21 nt, Artificial Sequence
  Synthetic sequence
gcuaccggccacaugcagcug

SEQ ID NO: 1293 - RNA, 21 nt, Artificial Sequence
  Synthetic sequence
gcugcauguggccgguagcac

SEQ ID NO: 1294 - RNA, 21 nt, Artificial Sequence
  Synthetic sequence
ggcccugugcuaccggccaca

SEQ ID NO: 1295 - RNA, 21 nt, Artificial Sequence
  Synthetic sequence
ggccgguagcacagggcccug

SEQ ID NO: 1296 - RNA, 21 nt, Artificial Sequence
  Synthetic sequence
gggcccugugcuaccggccac

SEQ ID NO: 1297 - RNA, 21 nt, Artificial Sequence
  Synthetic sequence
gguagcacagggcccugggua

SEQ ID NO: 1298 - RNA, 21 nt, Artificial Sequence
  Synthetic sequence
guagcacagggcccuggguaa

SEQ ID NO: 1299 - RNA, 21 nt, Artificial Sequence
  Synthetic sequence
gugcuaccggccacaugcagc

SEQ ID NO: 1300 - RNA, 21 nt, Artificial Sequence
  Synthetic sequence
guggccgguagcacagggccc

SEQ ID NO: 1301 - RNA, 21 nt, Artificial Sequence
  Synthetic sequence
guuuacccagggcccugugcu

SEQ ID NO: 1302 - RNA, 21 nt, Artificial Sequence
  Synthetic sequence
uacccagggcccugugcuacc

SEQ ID NO: 1303 - RNA, 21 nt, Artificial Sequence
  Synthetic sequence
uagcacagggcccuggguaaa

SEQ ID NO: 1304 - RNA, 21 nt, Artificial Sequence
  Synthetic sequence
ucaguuuacccagggcccugu

SEQ ID NO: 1305 - RNA, 21 nt, Artificial Sequence
  Synthetic sequence
ugcauguggccgguagcacag

SEQ ID NO: 1306 - RNA, 21 nt, Artificial Sequence
  Synthetic sequence
ugcuaccggccacaugcagcu

SEQ ID NO: 1307 - RNA, 21 nt, Artificial Sequence
  Synthetic sequence
uggccgguagcacagggcccu

SEQ ID NO: 1308 - RNA, 21 nt, Artificial Sequence
  Synthetic sequence
ugugcuaccggccacaugcag

SEQ ID NO: 1309 - RNA, 21 nt, Artificial Sequence
  Synthetic sequence
uguggccgguagcacagggcc

SEQ ID NO: 1310 - RNA, 21 nt, Artificial Sequence
  Synthetic sequence
uuacccagggcccugugcuac

SEQ ID NO: 1311 - RNA, 21 nt, Artificial Sequence
  Synthetic sequence
uuuacccagggcccugugcua

SEQ ID NO: 1312 - RNA, 22 nt, Artificial Sequence
  Synthetic sequence
acacagcugcauguggccggua

SEQ ID NO: 1313 - RNA, 22 nt, Artificial Sequence
  Synthetic sequence
acagcugcauguggccgguagc

SEQ ID NO: 1314 - RNA, 22 nt, Artificial Sequence
  Synthetic sequence
acccagggcccugugcuaccgg

SEQ ID NO: 1315 - RNA, 22 nt, Artificial Sequence
  Synthetic sequence
agcacagggcccuggguaaacu

SEQ ID NO: 1316 - RNA, 22 nt, Artificial Sequence
  Synthetic sequence
agcugcauguggccgguagcac

SEQ ID NO: 1317 - RNA, 22 nt, Artificial Sequence
  Synthetic sequence
agggcccugugcuaccggccac

SEQ ID NO: 1318 - RNA, 22 nt, Artificial Sequence
  Synthetic sequence
aguuuacccagggcccugugcu

SEQ ID NO: 1319 - RNA, 22 nt, Artificial Sequence
  Synthetic sequence
auguggccgguagcacagggcc

SEQ ID NO: 1320 - RNA, 22 nt, Artificial Sequence
  Synthetic sequence
cacagcugcauguggccgguag

SEQ ID NO: 1321 - RNA, 22 nt, Artificial Sequence
  Synthetic sequence
cagcugcauguggccgguagca

SEQ ID NO: 1322 - RNA, 22 nt, Artificial Sequence
  Synthetic sequence
cagggcccugugcuaccggcca

SEQ ID NO: 1323 - RNA, 22 nt, Artificial Sequence
  Synthetic sequence
caguuuacccagggcccugugc

SEQ ID NO: 1324 - RNA, 22 nt, Artificial Sequence
  Synthetic sequence
cauguggccgguagcacagggc

SEQ ID NO: 1325 - RNA, 22 nt, Artificial Sequence
  Synthetic sequence
ccagggcccugugcuaccggcc

SEQ ID NO: 1326 - RNA, 22 nt, Artificial Sequence
  Synthetic sequence
cccagggcccugugcuaccggc

SEQ ID NO: 1327 - RNA, 22 nt, Artificial Sequence
  Synthetic sequence
cccugugcuaccggccacaugc

SEQ ID NO: 1328 - RNA, 22 nt, Artificial Sequence
  Synthetic sequence
ccgguagcacagggcccugggu

SEQ ID NO: 1329 - RNA, 22 nt, Artificial Sequence
  Synthetic sequence
ccucaguuuacccagggcccug

SEQ ID NO: 1330 - RNA, 22 nt, Artificial Sequence
  Synthetic sequence
ccugugcuaccggccacaugca

SEQ ID NO: 1331 - RNA, 22 nt, Artificial Sequence
  Synthetic sequence
cgacacagcugcauguggccgg

SEQ ID NO: 1332 - RNA, 22 nt, Artificial Sequence
  Synthetic sequence
cgguagcacagggcccugggua

SEQ ID NO: 1333 - RNA, 22 nt, Artificial Sequence
  Synthetic sequence
cucaguuuacccagggcccugu

SEQ ID NO: 1334 - RNA, 22 nt, Artificial Sequence
  Synthetic sequence
cugcauguggccgguagcacag

SEQ ID NO: 1335 - RNA, 22 nt, Artificial Sequence
  Synthetic sequence
cugugcuaccggccacaugcag

SEQ ID NO: 1336 - RNA, 22 nt, Artificial Sequence
  Synthetic sequence
gacacagcugcauguggccggu

SEQ ID NO: 1337 - RNA, 22 nt, Artificial Sequence
  Synthetic sequence
gcauguggccgguagcacaggg

SEQ ID NO: 1338 - RNA, 22 nt, Artificial Sequence
  Synthetic sequence
gcccugugcuaccggccacaug

SEQ ID NO: 1339 - RNA, 22 nt, Artificial Sequence
  Synthetic sequence
gccgguagcacagggcccuggg

SEQ ID NO: 1340 - RNA, 22 nt, Artificial Sequence
  Synthetic sequence
gccucaguuuacccagggcccu

SEQ ID NO: 1341 - RNA, 22 nt, Artificial Sequence
  Synthetic sequence
gcgacacagcugcauguggccg

SEQ ID NO: 1342 - RNA, 22 nt, Artificial Sequence
  Synthetic sequence
gcuaccggccacaugcagcugu

SEQ ID NO: 1343 - RNA, 22 nt, Artificial Sequence
  Synthetic sequence
gcugcauguggccgguagcaca

SEQ ID NO: 1344 - RNA, 22 nt, Artificial Sequence
  Synthetic sequence
ggcccugugcuaccggccacau

SEQ ID NO: 1345 - RNA, 22 nt, Artificial Sequence
  Synthetic sequence
ggccgguagcacagggcccugg

SEQ ID NO: 1346 - RNA, 22 nt, Artificial Sequence
  Synthetic sequence
gggcccugugcuaccggccaca

SEQ ID NO: 1347 - RNA, 22 nt, Artificial Sequence
  Synthetic sequence
gguagcacagggcccuggguaa

SEQ ID NO: 1348 - RNA, 22 nt, Artificial Sequence
  Synthetic sequence
guagcacagggcccuggguaaa

SEQ ID NO: 1349 - RNA, 22 nt, Artificial Sequence
  Synthetic sequence
gugcuaccggccacaugcagcu

SEQ ID NO: 1350 - RNA, 22 nt, Artificial Sequence
  Synthetic sequence
guggccgguagcacagggcccu

SEQ ID NO: 1351 - RNA, 22 nt, Artificial Sequence
  Synthetic sequence
guuuacccagggcccugugcua

SEQ ID NO: 1352 - RNA, 22 nt, Artificial Sequence
  Synthetic sequence
uacccagggcccugugcuaccg

SEQ ID NO: 1353 - RNA, 22 nt, Artificial Sequence
  Synthetic sequence
uagcacagggcccuggguaaac

SEQ ID NO: 1354 - RNA, 22 nt, Artificial Sequence
  Synthetic sequence
ucaguuuacccagggcccugug

SEQ ID NO: 1355 - RNA, 22 nt, Artificial Sequence
  Synthetic sequence
ugcauguggccgguagcacagg

SEQ ID NO: 1356 - RNA, 22 nt, Artificial Sequence
  Synthetic sequence
ugcuaccggccacaugcagcug

SEQ ID NO: 1357 - RNA, 22 nt, Artificial Sequence
  Synthetic sequence
uggccgguagcacagggcccug

SEQ ID NO: 1358 - RNA, 22 nt, Artificial Sequence
  Synthetic sequence
ugugcuaccggccacaugcagc

SEQ ID NO: 1359 - RNA, 22 nt, Artificial Sequence
  Synthetic sequence
uguggccgguagcacagggccc

SEQ ID NO: 1360 - RNA, 22 nt, Artificial Sequence
  Synthetic sequence
uuacccagggcccugugcuacc

SEQ ID NO: 1361 - RNA, 22 nt, Artificial Sequence
  Synthetic sequence
uuuacccagggcccugugcuac

SEQ ID NO: 1362 - RNA, 21 nt, Artificial Sequence
  Synthetic sequence
acccagggccccgugauaccg

SEQ ID NO: 1363 - RNA, 21 nt, Artificial Sequence
  Synthetic sequence
acggggcccuggguaaacuga

SEQ ID NO: 1364 - RNA, 21 nt, Artificial Sequence
  Synthetic sequence
aguuuacccagggccccguga

SEQ ID NO: 1365 - RNA, 21 nt, Artificial Sequence
  Synthetic sequence
aucacggggcccuggguaaac

SEQ ID NO: 1366 - RNA, 21 nt, Artificial Sequence
  Synthetic sequence
cacggggcccuggguaaacug

SEQ ID NO: 1367 - RNA, 21 nt, Artificial Sequence
  Synthetic sequence
caguuuacccagggccccgug

SEQ ID NO: 1368 - RNA, 21 nt, Artificial Sequence
  Synthetic sequence
cccagggccccgugauaccgg

SEQ ID NO: 1369 - RNA, 21 nt, Artificial Sequence
  Synthetic sequence
ccgguaucacggggcccuggg

SEQ ID NO: 1370 - RNA, 21 nt, Artificial Sequence
  Synthetic sequence
ccucaguuuacccagggcccc

SEQ ID NO: 1371 - RNA, 21 nt, Artificial Sequence
  Synthetic sequence
ccugccucaguuuacccaggg

SEQ ID NO: 1372 - RNA, 21 nt, Artificial Sequence
  Synthetic sequence
cggggcccuggguaaacugag

SEQ ID NO: 1373 - RNA, 21 nt, Artificial Sequence
  Synthetic sequence
cgguaucacggggcccugggu

SEQ ID NO: 1374 - RNA, 21 nt, Artificial Sequence
  Synthetic sequence
cucaguuuacccagggccccg

SEQ ID NO: 1375 - RNA, 21 nt, Artificial Sequence
  Synthetic sequence
cugccucaguuuacccagggc

SEQ ID NO: 1376 - RNA, 21 nt, Artificial Sequence
  Synthetic sequence
gccgguaucacggggcccugg

SEQ ID NO: 1377 - RNA, 21 nt, Artificial Sequence
  Synthetic sequence
gccucaguuuacccagggccc

SEQ ID NO: 1378 - RNA, 21 nt, Artificial Sequence
  Synthetic sequence
ggccgguaucacggggcccug

SEQ ID NO: 1379 - RNA, 21 nt, Artificial Sequence
  Synthetic sequence
gguaucacggggcccugggua

SEQ ID NO: 1380 - RNA, 21 nt, Artificial Sequence
  Synthetic sequence
guaucacggggcccuggguaa

SEQ ID NO: 1381 - RNA, 21 nt, Artificial Sequence
  Synthetic sequence
guggccgguaucacggggccc

SEQ ID NO: 1382 - RNA, 21 nt, Artificial Sequence
  Synthetic sequence
guuuacccagggccccgugau

SEQ ID NO: 1383 - RNA, 21 nt, Artificial Sequence
  Synthetic sequence
uacccagggccccgugauacc

SEQ ID NO: 1384 - RNA, 21 nt, Artificial Sequence
  Synthetic sequence
uaucacggggcccuggguaaa

SEQ ID NO: 1385 - RNA, 21 nt, Artificial Sequence
  Synthetic sequence
ucacggggcccuggguaaacu

SEQ ID NO: 1386 - RNA, 21 nt, Artificial Sequence
  Synthetic sequence
ucaguuuacccagggccccgu

SEQ ID NO: 1387 - RNA, 21 nt, Artificial Sequence
  Synthetic sequence
ugccucaguuuacccagggcc

SEQ ID NO: 1388 - RNA, 21 nt, Artificial Sequence
  Synthetic sequence
uggccgguaucacggggcccu

SEQ ID NO: 1389 - RNA, 21 nt, Artificial Sequence
  Synthetic sequence
uuacccagggccccgugauac

SEQ ID NO: 1390 - RNA, 21 nt, Artificial Sequence
  Synthetic sequence
uuuacccagggccccgugaua

SEQ ID NO: 1391 - RNA, 22 nt, Artificial Sequence
  Synthetic sequence
acccagggccccgugauaccgg

SEQ ID NO: 1392 - RNA, 22 nt, Artificial Sequence
  Synthetic sequence
acggggcccuggguaaacugag

SEQ ID NO: 1393 - RNA, 22 nt, Artificial Sequence
  Synthetic sequence
aguuuacccagggccccgugau

SEQ ID NO: 1394 - RNA, 22 nt, Artificial Sequence
  Synthetic sequence
aucacggggcccuggguaaacu

SEQ ID NO: 1395 - RNA, 22 nt, Artificial Sequence
  Synthetic sequence
cacggggcccuggguaaacuga

SEQ ID NO: 1396 - RNA, 22 nt, Artificial Sequence
  Synthetic sequence
caguuuacccagggccccguga

SEQ ID NO: 1397 - RNA, 22 nt, Artificial Sequence
  Synthetic sequence
cccagggccccgugauaccggc

SEQ ID NO: 1398 - RNA, 22 nt, Artificial Sequence
  Synthetic sequence
ccgguaucacggggcccugggu

SEQ ID NO: 1399 - RNA, 22 nt, Artificial Sequence
  Synthetic sequence
ccucaguuuacccagggccccg

SEQ ID NO: 1400 - RNA, 22 nt, Artificial Sequence
  Synthetic sequence
ccugccucaguuuacccagggc

SEQ ID NO: 1401 - RNA, 22 nt, Artificial Sequence
  Synthetic sequence
cggggcccuggguaaacugagg

SEQ ID NO: 1402 - RNA, 22 nt, Artificial Sequence
  Synthetic sequence
cgguaucacggggcccugggua

SEQ ID NO: 1403 - RNA, 22 nt, Artificial Sequence
  Synthetic sequence
cucaguuuacccagggccccgu

SEQ ID NO: 1404 - RNA, 22 nt, Artificial Sequence
  Synthetic sequence
cugccucaguuuacccagggcc

SEQ ID NO: 1405 - RNA, 22 nt, Artificial Sequence
  Synthetic sequence
gccgguaucacggggcccuggg

SEQ ID NO: 1406 - RNA, 22 nt, Artificial Sequence
  Synthetic sequence
gccucaguuuacccagggcccc

SEQ ID NO: 1407 - RNA, 22 nt, Artificial Sequence
  Synthetic sequence
gccugccucaguuuacccaggg

SEQ ID NO: 1408 - RNA, 22 nt, Artificial Sequence
  Synthetic sequence
ggccgguaucacggggcccugg

SEQ ID NO: 1409 - RNA, 22 nt, Artificial Sequence
  Synthetic sequence
gguaucacggggcccuggguaa

SEQ ID NO: 1410 - RNA, 22 nt, Artificial Sequence
  Synthetic sequence
guaucacggggcccuggguaaa

SEQ ID NO: 1411 - RNA, 22 nt, Artificial Sequence
  Synthetic sequence
guggccgguaucacggggcccu

SEQ ID NO: 1412 - RNA, 22 nt, Artificial Sequence
  Synthetic sequence
guuuacccagggccccgugaua

SEQ ID NO: 1413 - RNA, 22 nt, Artificial Sequence
  Synthetic sequence
uacccagggccccgugauaccg

SEQ ID NO: 1414 - RNA, 22 nt, Artificial Sequence
  Synthetic sequence
uaucacggggcccuggguaaac

SEQ ID NO: 1415 - RNA, 22 nt, Artificial Sequence
  Synthetic sequence
ucacggggcccuggguaaacug

SEQ ID NO: 1416 - RNA, 22 nt, Artificial Sequence
  Synthetic sequence
ucaguuuacccagggccccgug

SEQ ID NO: 1417 - RNA, 22 nt, Artificial Sequence
  Synthetic sequence
ugccucaguuuacccagggccc

SEQ ID NO: 1418 - RNA, 22 nt, Artificial Sequence
  Synthetic sequence
uggccgguaucacggggcccug

SEQ ID NO: 1419 - RNA, 22 nt, Artificial Sequence
  Synthetic sequence
uguggccgguaucacggggccc

SEQ ID NO: 1420 - RNA, 22 nt, Artificial Sequence
  Synthetic sequence
uuacccagggccccgugauacc

SEQ ID NO: 1421 - RNA, 22 nt, Artificial Sequence
  Synthetic sequence
uuuacccagggccccgugauac

SEQ ID NO: 1422 - RNA, 21 nt, Artificial Sequence
  Synthetic sequence
aggaugcacaaucgcauucaa

SEQ ID NO: 1423 - RNA, 21 nt, Artificial Sequence
  Synthetic sequence
caggaugcacaaucgcauuca

SEQ ID NO: 1424 - RNA, 21 nt, Artificial Sequence
  Synthetic sequence
gacauuugaaugcgauugugc

SEQ ID NO: 1425 - RNA, 21 nt, Artificial Sequence
  Synthetic sequence
gcacaaucgcauucaaauguc

SEQ ID NO: 1426 - RNA, 21 nt, Artificial Sequence
  Synthetic sequence
ggaugcacaaucgcauucaaa

SEQ ID NO: 1427 - RNA, 22 nt, Artificial Sequence
  Synthetic sequence
aggaugcacaaucgcauucaaa

SEQ ID NO: 1428 - RNA, 22 nt, Artificial Sequence
  Synthetic sequence
cacaaucgcauucaaaugucag

SEQ ID NO: 1429 - RNA, 22 nt, Artificial Sequence
  Synthetic sequence
caggaugcacaaucgcauucaa

SEQ ID NO: 1430 - RNA, 22 nt, Artificial Sequence
  Synthetic sequence
cugacauuugaaugcgauugug

SEQ ID NO: 1431 - RNA, 22 nt, Artificial Sequence
  Synthetic sequence
gacauuugaaugcgauugugca

SEQ ID NO: 1432 - RNA, 22 nt, Artificial Sequence
  Synthetic sequence
gaugcacaaucgcauucaaaug

SEQ ID NO: 1433 - RNA, 22 nt, Artificial Sequence
  Synthetic sequence
gcacaaucgcauucaaauguca

SEQ ID NO: 1434 - RNA, 22 nt, Artificial Sequence
  Synthetic sequence
ggaugcacaaucgcauucaaau

SEQ ID NO: 1435 - RNA, 22 nt, Artificial Sequence
  Synthetic sequence
ucaggaugcacaaucgcauuca

SEQ ID NO: 1436 - RNA, 22 nt, Artificial Sequence
  Synthetic sequence
ugacauuugaaugcgauugugc

SEQ ID NO: 1437 - RNA, 22 nt, Artificial Sequence
  Synthetic sequence
ugcacaaucgcauucaaauguc

SEQ ID NO: 1438 - RNA, 21 nt, Artificial Sequence
  Synthetic sequence
agaguugggguuugaaaaccg

SEQ ID NO: 1439 - RNA, 21 nt, Artificial Sequence
  Synthetic sequence
aguugggguuugaaaaccggg

SEQ ID NO: 1440 - RNA, 21 nt, Artificial Sequence
  Synthetic sequence
ccccccuccccgguuuucaaa

SEQ ID NO: 1441 - RNA, 21 nt, Artificial Sequence
  Synthetic sequence
cccccuccccgguuuucaaac

SEQ ID NO: 1442 - RNA, 21 nt, Artificial Sequence
  Synthetic sequence
ccccuccccgguuuucaaacc

SEQ ID NO: 1443 - RNA, 21 nt, Artificial Sequence
  Synthetic sequence
cccuccccgguuuucaaaccc

SEQ ID NO: 1444 - RNA, 21 nt, Artificial Sequence
  Synthetic sequence
ccuccccgguuuucaaacccc

SEQ ID NO: 1445 - RNA, 21 nt, Artificial Sequence
  Synthetic sequence
cuccccgguuuucaaacccca

SEQ ID NO: 1446 - RNA, 21 nt, Artificial Sequence
  Synthetic sequence
gaguugggguuugaaaaccgg

SEQ ID NO: 1447 - RNA, 21 nt, Artificial Sequence
  Synthetic sequence
gggguuugaaaaccggggagg

SEQ ID NO: 1448 - RNA, 21 nt, Artificial Sequence
  Synthetic sequence
ggguuugaaaaccggggaggg

SEQ ID NO: 1449 - RNA, 21 nt, Artificial Sequence
  Synthetic sequence
gguuugaaaaccggggagggg

SEQ ID NO: 1450 - RNA, 21 nt, Artificial Sequence
  Synthetic sequence
guugggguuugaaaaccgggg

SEQ ID NO: 1451 - RNA, 21 nt, Artificial Sequence
  Synthetic sequence
guuugaaaaccggggaggggg

SEQ ID NO: 1452 - RNA, 21 nt, Artificial Sequence
  Synthetic sequence
ugggguuugaaaaccggggag

SEQ ID NO: 1453 - RNA, 21 nt, Artificial Sequence
  Synthetic sequence
uugggguuugaaaaccgggga

SEQ ID NO: 1454 - RNA, 21 nt, Artificial Sequence
  Synthetic sequence
uuugaaaaccggggagggggg

SEQ ID NO: 1455 - RNA, 22 nt, Artificial Sequence
  Synthetic sequence
agaguugggguuugaaaaccgg

SEQ ID NO: 1456 - RNA, 22 nt, Artificial Sequence
  Synthetic sequence
aguugggguuugaaaaccgggg

SEQ ID NO: 1457 - RNA, 22 nt, Artificial Sequence
  Synthetic sequence
cagaguugggguuugaaaaccg

SEQ ID NO: 1458 - RNA, 22 nt, Artificial Sequence
  Synthetic sequence
ccccccuccccgguuuucaaac

SEQ ID NO: 1459 - RNA, 22 nt, Artificial Sequence
  Synthetic sequence
cccccuccccgguuuucaaacc

SEQ ID NO: 1460 - RNA, 22 nt, Artificial Sequence
  Synthetic sequence
ccccuccccgguuuucaaaccc

SEQ ID NO: 1461 - RNA, 22 nt, Artificial Sequence
  Synthetic sequence
cccuccccgguuuucaaacccc

SEQ ID NO: 1462 - RNA, 22 nt, Artificial Sequence
  Synthetic sequence
ccuccccgguuuucaaacccca

SEQ ID NO: 1463 - RNA, 22 nt, Artificial Sequence
  Synthetic sequence
cuccccgguuuucaaaccccaa

SEQ ID NO: 1464 - RNA, 22 nt, Artificial Sequence
  Synthetic sequence
gaguugggguuugaaaaccggg

SEQ ID NO: 1465 - RNA, 22 nt, Artificial Sequence
  Synthetic sequence
gggguuugaaaaccggggaggg

SEQ ID NO: 1466 - RNA, 22 nt, Artificial Sequence
  Synthetic sequence
ggguuugaaaaccggggagggg

SEQ ID NO: 1467 - RNA, 22 nt, Artificial Sequence
  Synthetic sequence
gguuugaaaaccggggaggggg

SEQ ID NO: 1468 - RNA, 22 nt, Artificial Sequence
  Synthetic sequence
guugggguuugaaaaccgggga

SEQ ID NO: 1469 - RNA, 22 nt, Artificial Sequence
  Synthetic sequence
guuugaaaaccggggagggggg

SEQ ID NO: 1470 - RNA, 22 nt, Artificial Sequence
  Synthetic sequence
ugggguuugaaaaccggggagg

SEQ ID NO: 1471 - RNA, 22 nt, Artificial Sequence
  Synthetic sequence
uugggguuugaaaaccggggag

SEQ ID NO: 1472 - RNA, 22 nt, Artificial Sequence
  Synthetic sequence
agagggcgaccugcgacccccc

SEQ ID NO: 1473 - RNA, 21 nt, Artificial Sequence
  Synthetic sequence
ccccccgguuuucaaacccca

SEQ ID NO: 1474 - RNA, 21 nt, Artificial Sequence
  Synthetic sequence
ugggguuugaaaaccgggggg

SEQ ID NO: 1475 - RNA, 21 nt, Artificial Sequence
  Synthetic sequence
uugggguuugaaaaccggggg

SEQ ID NO: 1476 - RNA, 22 nt, Artificial Sequence
  Synthetic sequence
ccccccgguuuucaaaccccaa

SEQ ID NO: 1477 - RNA, 22 nt, Artificial Sequence
  Synthetic sequence
guugggguuugaaaaccggggg

SEQ ID NO: 1478 - RNA, 22 nt, Artificial Sequence
  Synthetic sequence
uugggguuugaaaaccgggggg

SEQ ID NO: 1479 - RNA, 21 nt, Artificial Sequence
  Synthetic sequence
aacccagagggcgaccugcga

SEQ ID NO: 1480 - RNA, 21 nt, Artificial Sequence
  Synthetic sequence
acccagagggcgaccugcgac

SEQ ID NO: 1481 - RNA, 21 nt, Artificial Sequence
  Synthetic sequence
agagggcgaccugcgaccccc

SEQ ID NO: 1482 - RNA, 21 nt, Artificial Sequence
  Synthetic sequence
cagagggcgaccugcgacccc

SEQ ID NO: 1483 - RNA, 21 nt, Artificial Sequence
  Synthetic sequence
ccagagggcgaccugcgaccc

SEQ ID NO: 1484 - RNA, 21 nt, Artificial Sequence
  Synthetic sequence
cccagagggcgaccugcgacc

SEQ ID NO: 1485 - RNA, 21 nt, Artificial Sequence
  Synthetic sequence
cuugaacccagagggcgaccu

SEQ ID NO: 1486 - RNA, 21 nt, Artificial Sequence
  Synthetic sequence
gaacccagagggcgaccugcg

SEQ ID NO: 1487 - RNA, 21 nt, Artificial Sequence
  Synthetic sequence
gggggucgcaggucgcccucu

SEQ ID NO: 1488 - RNA, 21 nt, Artificial Sequence
  Synthetic sequence
ggggucgcaggucgcccucug

SEQ ID NO: 1489 - RNA, 21 nt, Artificial Sequence
  Synthetic sequence
gggucgcaggucgcccucugg

SEQ ID NO: 1490 - RNA, 21 nt, Artificial Sequence
  Synthetic sequence
ggucgcaggucgcccucuggg

SEQ ID NO: 1491 - RNA, 21 nt, Artificial Sequence
  Synthetic sequence
gucgcaggucgcccucugggu

SEQ ID NO: 1492 - RNA, 21 nt, Artificial Sequence
  Synthetic sequence
ugaacccagagggcgaccugc

SEQ ID NO: 1493 - RNA, 21 nt, Artificial Sequence
  Synthetic sequence
uugaacccagagggcgaccug

SEQ ID NO: 1494 - RNA, 22 nt, Artificial Sequence
  Synthetic sequence
aacccagagggcgaccugcgac

SEQ ID NO: 1495 - RNA, 22 nt, Artificial Sequence
  Synthetic sequence
acccagagggcgaccugcgacc

SEQ ID NO: 1496 - RNA, 22 nt, Artificial Sequence
  Synthetic sequence
acuugaacccagagggcgaccu

SEQ ID NO: 1497 - RNA, 22 nt, Artificial Sequence
  Synthetic sequence
cagagggcgaccugcgaccccc

SEQ ID NO: 1498 - RNA, 22 nt, Artificial Sequence
  Synthetic sequence
ccagagggcgaccugcgacccc

SEQ ID NO: 1499 - RNA, 22 nt, Artificial Sequence
  Synthetic sequence
cccagagggcgaccugcgaccc

SEQ ID NO: 1500 - RNA, 22 nt, Artificial Sequence
  Synthetic sequence
cuugaacccagagggcgaccug

SEQ ID NO: 1501 - RNA, 22 nt, Artificial Sequence
  Synthetic sequence
gaacccagagggcgaccugcga

SEQ ID NO: 1502 - RNA, 22 nt, Artificial Sequence
  Synthetic sequence
ggggggucgcaggucgcccucu

SEQ ID NO: 1503 - RNA, 22 nt, Artificial Sequence
  Synthetic sequence
gggggucgcaggucgcccucug

SEQ ID NO: 1504 - RNA, 22 nt, Artificial Sequence
  Synthetic sequence
ggggucgcaggucgcccucugg

SEQ ID NO: 1505 - RNA, 22 nt, Artificial Sequence
  Synthetic sequence
gggucgcaggucgcccucuggg

SEQ ID NO: 1506 - RNA, 22 nt, Artificial Sequence
  Synthetic sequence
ggucgcaggucgcccucugggu

SEQ ID NO: 1507 - RNA, 22 nt, Artificial Sequence
  Synthetic sequence
gucgcaggucgcccucuggguu

SEQ ID NO: 1508 - RNA, 22 nt, Artificial Sequence
  Synthetic sequence
ugaacccagagggcgaccugcg

SEQ ID NO: 1509 - RNA, 22 nt, Artificial Sequence
  Synthetic sequence
uugaacccagagggcgaccugc

SEQ ID NO: 1510 - RNA, 21 nt, Artificial Sequence
  Synthetic sequence
aacccagagggcgaccugcgc

SEQ ID NO: 1511 - RNA, 21 nt, Artificial Sequence
  Synthetic sequence
acccagagggcgaccugcgcc

SEQ ID NO: 1512 - RNA, 21 nt, Artificial Sequence
  Synthetic sequence
ggcgcaggucgcccucugggu

SEQ ID NO: 1513 - RNA, 22 nt, Artificial Sequence
  Synthetic sequence
aacccagagggcgaccugcgcc

SEQ ID NO: 1514 - RNA, 22 nt, Artificial Sequence
  Synthetic sequence
acccagagggcgaccugcgccc

SEQ ID NO: 1515 - RNA, 22 nt, Artificial Sequence
  Synthetic sequence
gaacccagagggcgaccugcgc

SEQ ID NO: 1516 - RNA, 22 nt, Artificial Sequence
  Synthetic sequence
ggcgcaggucgcccucuggguu

SEQ ID NO: 1517 - RNA, 22 nt, Artificial Sequence
  Synthetic sequence
gggcgcaggucgcccucugggu

SEQ ID NO: 1518 - RNA, 21 nt, Artificial Sequence
  Synthetic sequence
caccgcaccuggcaauuuuuu

SEQ ID NO: 1519 - RNA, 21 nt, Artificial Sequence
  Synthetic sequence
ccaccgcaccuggcaauuuuu

SEQ ID NO: 1520 - RNA, 22 nt, Artificial Sequence
  Synthetic sequence
ccaccgcaccuggcaauuuuuu

SEQ ID NO: 1521 - RNA, 22 nt, Artificial Sequence
  Synthetic sequence
gccaccgcaccuggcaauuuuu

SEQ ID NO: 1522 - RNA, 21 nt, Artificial Sequence
  Synthetic sequence
aaggggcugccggaguccccc

SEQ ID NO: 1523 - RNA, 21 nt, Artificial Sequence
  Synthetic sequence
acagggggacuccggcagccc

SEQ ID NO: 1524 - RNA, 21 nt, Artificial Sequence
  Synthetic sequence
accaaggggcugccggagucc

SEQ ID NO: 1525 - RNA, 21 nt, Artificial Sequence
  Synthetic sequence
acuccggcagccccuuggucu

SEQ ID NO: 1526 - RNA, 21 nt, Artificial Sequence
  Synthetic sequence
agaccaaggggcugccggagu

SEQ ID NO: 1527 - RNA, 21 nt, Artificial Sequence
  Synthetic sequence
aggggcugccggagucccccu

SEQ ID NO: 1528 - RNA, 21 nt, Artificial Sequence
  Synthetic sequence
agggggacuccggcagccccu

SEQ ID NO: 1529 - RNA, 21 nt, Artificial Sequence
  Synthetic sequence
caaggggcugccggagucccc

SEQ ID NO: 1530 - RNA, 21 nt, Artificial Sequence
  Synthetic sequence
cacagggggacuccggcagcc

SEQ ID NO: 1531 - RNA, 21 nt, Artificial Sequence
  Synthetic sequence
cagaccaaggggcugccggag

SEQ ID NO: 1532 - RNA, 21 nt, Artificial Sequence
  Synthetic sequence
ccaaggggcugccggaguccc

SEQ ID NO: 1533 - RNA, 21 nt, Artificial Sequence
  Synthetic sequence
ccacagggggacuccggcagc

SEQ ID NO: 1534 - RNA, 21 nt, Artificial Sequence
  Synthetic sequence
cccguugcagaccaaggggcu

SEQ ID NO: 1535 - RNA, 21 nt, Artificial Sequence
  Synthetic sequence
ccggagucccccuguggaggc

SEQ ID NO: 1536 - RNA, 21 nt, Artificial Sequence
  Synthetic sequence
ccggcagccccuuggucugca

SEQ ID NO: 1537 - RNA, 21 nt, Artificial Sequence
  Synthetic sequence
ccguugcagaccaaggggcug

SEQ ID NO: 1538 - RNA, 21 nt, Artificial Sequence
  Synthetic sequence
ccuccacagggggacuccggc

SEQ ID NO: 1539 - RNA, 21 nt, Artificial Sequence
  Synthetic sequence
cggagucccccuguggaggca

SEQ ID NO: 1540 - RNA, 21 nt, Artificial Sequence
  Synthetic sequence
cguugcagaccaaggggcugc

SEQ ID NO: 1541 - RNA, 21 nt, Artificial Sequence
  Synthetic sequence
cuccacagggggacuccggca

SEQ ID NO: 1542 - RNA, 21 nt, Artificial Sequence
  Synthetic sequence
cuccggcagccccuuggucug

SEQ ID NO: 1543 - RNA, 21 nt, Artificial Sequence
  Synthetic sequence
cugccggagucccccugugga

SEQ ID NO: 1544 - RNA, 21 nt, Artificial Sequence
  Synthetic sequence
cugccuccacagggggacucc

SEQ ID NO: 1545 - RNA, 21 nt, Artificial Sequence
  Synthetic sequence
gaccaaggggcugccggaguc

SEQ ID NO: 1546 - RNA, 21 nt, Artificial Sequence
  Synthetic sequence
gacuccggcagccccuugguc

SEQ ID NO: 1547 - RNA, 21 nt, Artificial Sequence
  Synthetic sequence
gcagaccaaggggcugccgga

SEQ ID NO: 1548 - RNA, 21 nt, Artificial Sequence
  Synthetic sequence
gccggagucccccuguggagg

SEQ ID NO: 1549 - RNA, 21 nt, Artificial Sequence
  Synthetic sequence
gccuccacagggggacuccgg

SEQ ID NO: 1550 - RNA, 21 nt, Artificial Sequence
  Synthetic sequence
gcugccggagucccccugugg

SEQ ID NO: 1551 - RNA, 21 nt, Artificial Sequence
  Synthetic sequence
ggacuccggcagccccuuggu

SEQ ID NO: 1552 - RNA, 21 nt, Artificial Sequence
  Synthetic sequence
ggcugccggagucccccugug

SEQ ID NO: 1553 - RNA, 21 nt, Artificial Sequence
  Synthetic sequence
gggacuccggcagccccuugg

SEQ ID NO: 1554 - RNA, 21 nt, Artificial Sequence
  Synthetic sequence
gggcugccggagucccccugu

SEQ ID NO: 1555 - RNA, 21 nt, Artificial Sequence
  Synthetic sequence
ggggacuccggcagccccuug

SEQ ID NO: 1556 - RNA, 21 nt, Artificial Sequence
  Synthetic sequence
gggggacuccggcagccccuu

SEQ ID NO: 1557 - RNA, 21 nt, Artificial Sequence
  Synthetic sequence
gucugccuccacagggggacu

SEQ ID NO: 1558 - RNA, 21 nt, Artificial Sequence
  Synthetic sequence
guugcagaccaaggggcugcc

SEQ ID NO: 1559 - RNA, 21 nt, Artificial Sequence
  Synthetic sequence
uccacagggggacuccggcag

SEQ ID NO: 1560 - RNA, 21 nt, Artificial Sequence
  Synthetic sequence
uccggcagccccuuggucugc

SEQ ID NO: 1561 - RNA, 21 nt, Artificial Sequence
  Synthetic sequence
ucugccuccacagggggacuc

SEQ ID NO: 1562 - RNA, 21 nt, Artificial Sequence
  Synthetic sequence
ugcagaccaaggggcugccgg

SEQ ID NO: 1563 - RNA, 21 nt, Artificial Sequence
  Synthetic sequence
ugccggagucccccuguggag

SEQ ID NO: 1564 - RNA, 21 nt, Artificial Sequence
  Synthetic sequence
ugccuccacagggggacuccg

SEQ ID NO: 1565 - RNA, 21 nt, Artificial Sequence
  Synthetic sequence
ugucugccuccacagggggac

SEQ ID NO: 1566 - RNA, 21 nt, Artificial Sequence
  Synthetic sequence
uugcagaccaaggggcugccg

SEQ ID NO: 1567 - RNA, 21 nt, Artificial Sequence
  Synthetic sequence
uugucugccuccacaggggga

SEQ ID NO: 1568 - RNA, 22 nt, Artificial Sequence
  Synthetic sequence
aaggggcugccggagucccccu

SEQ ID NO: 1569 - RNA, 22 nt, Artificial Sequence
  Synthetic sequence
acagggggacuccggcagcccc

SEQ ID NO: 1570 - RNA, 22 nt, Artificial Sequence
  Synthetic sequence
accaaggggcugccggaguccc

SEQ ID NO: 1571 - RNA, 22 nt, Artificial Sequence
  Synthetic sequence
acuccggcagccccuuggucug

SEQ ID NO: 1572 - RNA, 22 nt, Artificial Sequence
  Synthetic sequence
agaccaaggggcugccggaguc

SEQ ID NO: 1573 - RNA, 22 nt, Artificial Sequence
  Synthetic sequence
aggggcugccggagucccccug

SEQ ID NO: 1574 - RNA, 22 nt, Artificial Sequence
  Synthetic sequence
agggggacuccggcagccccuu

SEQ ID NO: 1575 - RNA, 22 nt, Artificial Sequence
  Synthetic sequence
caaggggcugccggaguccccc

SEQ ID NO: 1576 - RNA, 22 nt, Artificial Sequence
  Synthetic sequence
cacagggggacuccggcagccc

SEQ ID NO: 1577 - RNA, 22 nt, Artificial Sequence
  Synthetic sequence
cagaccaaggggcugccggagu

SEQ ID NO: 1578 - RNA, 22 nt, Artificial Sequence
  Synthetic sequence
cagggggacuccggcagccccu

SEQ ID NO: 1579 - RNA, 22 nt, Artificial Sequence
  Synthetic sequence
ccaaggggcugccggagucccc

SEQ ID NO: 1580 - RNA, 22 nt, Artificial Sequence
  Synthetic sequence
ccacagggggacuccggcagcc

SEQ ID NO: 1581 - RNA, 22 nt, Artificial Sequence
  Synthetic sequence
cccguugcagaccaaggggcug

SEQ ID NO: 1582 - RNA, 22 nt, Artificial Sequence
  Synthetic sequence
ccggagucccccuguggaggca

SEQ ID NO: 1583 - RNA, 22 nt, Artificial Sequence
  Synthetic sequence
ccggcagccccuuggucugcaa

SEQ ID NO: 1584 - RNA, 22 nt, Artificial Sequence
  Synthetic sequence
ccguugcagaccaaggggcugc

SEQ ID NO: 1585 - RNA, 22 nt, Artificial Sequence
  Synthetic sequence
ccuccacagggggacuccggca

SEQ ID NO: 1586 - RNA, 22 nt, Artificial Sequence
  Synthetic sequence
cggagucccccuguggaggcag

SEQ ID NO: 1587 - RNA, 22 nt, Artificial Sequence
  Synthetic sequence
cguugcagaccaaggggcugcc

SEQ ID NO: 1588 - RNA, 22 nt, Artificial Sequence
  Synthetic sequence
cuccacagggggacuccggcag

SEQ ID NO: 1589 - RNA, 22 nt, Artificial Sequence
  Synthetic sequence
cuccggcagccccuuggucugc

SEQ ID NO: 1590 - RNA, 22 nt, Artificial Sequence
  Synthetic sequence
cugccggagucccccuguggag

SEQ ID NO: 1591 - RNA, 22 nt, Artificial Sequence
  Synthetic sequence
cugccuccacagggggacuccg

SEQ ID NO: 1592 - RNA, 22 nt, Artificial Sequence
  Synthetic sequence
cuugucugccuccacaggggga

SEQ ID NO: 1593 - RNA, 22 nt, Artificial Sequence
  Synthetic sequence
gaccaaggggcugccggagucc

SEQ ID NO: 1594 - RNA, 22 nt, Artificial Sequence
  Synthetic sequence
gacuccggcagccccuuggucu

SEQ ID NO: 1595 - RNA, 22 nt, Artificial Sequence
  Synthetic sequence
gcagaccaaggggcugccggag

SEQ ID NO: 1596 - RNA, 22 nt, Artificial Sequence
  Synthetic sequence
gcccguugcagaccaaggggcu

SEQ ID NO: 1597 - RNA, 22 nt, Artificial Sequence
  Synthetic sequence
gccggagucccccuguggaggc

SEQ ID NO: 1598 - RNA, 22 nt, Artificial Sequence
  Synthetic sequence
gccuccacagggggacuccggc

SEQ ID NO: 1599 - RNA, 22 nt, Artificial Sequence
  Synthetic sequence
gcugccggagucccccugugga

SEQ ID NO: 1600 - RNA, 22 nt, Artificial Sequence
  Synthetic sequence
ggacuccggcagccccuugguc

SEQ ID NO: 1601 - RNA, 22 nt, Artificial Sequence
  Synthetic sequence
ggcugccggagucccccugugg

SEQ ID NO: 1602 - RNA, 22 nt, Artificial Sequence
  Synthetic sequence
gggacuccggcagccccuuggu

SEQ ID NO: 1603 - RNA, 22 nt, Artificial Sequence
  Synthetic sequence
gggcugccggagucccccugug

SEQ ID NO: 1604 - RNA, 22 nt, Artificial Sequence
  Synthetic sequence
ggggacuccggcagccccuugg

SEQ ID NO: 1605 - RNA, 22 nt, Artificial Sequence
  Synthetic sequence
ggggcugccggagucccccugu

SEQ ID NO: 1606 - RNA, 22 nt, Artificial Sequence
  Synthetic sequence
gggggacuccggcagccccuug

SEQ ID NO: 1607 - RNA, 22 nt, Artificial Sequence
  Synthetic sequence
gucugccuccacagggggacuc

SEQ ID NO: 1608 - RNA, 22 nt, Artificial Sequence
  Synthetic sequence
guugcagaccaaggggcugccg

SEQ ID NO: 1609 - RNA, 22 nt, Artificial Sequence
  Synthetic sequence
uccacagggggacuccggcagc

SEQ ID NO: 1610 - RNA, 22 nt, Artificial Sequence
  Synthetic sequence
uccggcagccccuuggucugca

SEQ ID NO: 1611 - RNA, 22 nt, Artificial Sequence
  Synthetic sequence
ucugccuccacagggggacucc

SEQ ID NO: 1612 - RNA, 22 nt, Artificial Sequence
  Synthetic sequence
ugcagaccaaggggcugccgga

SEQ ID NO: 1613 - RNA, 22 nt, Artificial Sequence
  Synthetic sequence
ugccggagucccccuguggagg

SEQ ID NO: 1614 - RNA, 22 nt, Artificial Sequence
  Synthetic sequence
ugccuccacagggggacuccgg

SEQ ID NO: 1615 - RNA, 22 nt, Artificial Sequence
  Synthetic sequence
ugucugccuccacagggggacu

SEQ ID NO: 1616 - RNA, 22 nt, Artificial Sequence
  Synthetic sequence
uugcagaccaaggggcugccgg

SEQ ID NO: 1617 - RNA, 22 nt, Artificial Sequence
  Synthetic sequence
uugucugccuccacagggggac

SEQ ID NO: 1618 - RNA, 21 nt, Artificial Sequence
  Synthetic sequence
aaggggcugccugaguccccc

SEQ ID NO: 1619 - RNA, 21 nt, Artificial Sequence
  Synthetic sequence
acagggggacucaggcagccc

SEQ ID NO: 1620 - RNA, 21 nt, Artificial Sequence
  Synthetic sequence
accaaggggcugccugagucc

SEQ ID NO: 1621 - RNA, 21 nt, Artificial Sequence
  Synthetic sequence
acucaggcagccccuuggucu

SEQ ID NO: 1622 - RNA, 21 nt, Artificial Sequence
  Synthetic sequence
agaccaaggggcugccugagu

SEQ ID NO: 1623 - RNA, 21 nt, Artificial Sequence
  Synthetic sequence
aggggcugccugagucccccu

SEQ ID NO: 1624 - RNA, 21 nt, Artificial Sequence
  Synthetic sequence
agggggacucaggcagccccu

SEQ ID NO: 1625 - RNA, 21 nt, Artificial Sequence
  Synthetic sequence
caaggggcugccugagucccc

SEQ ID NO: 1626 - RNA, 21 nt, Artificial Sequence
  Synthetic sequence
cacagggggacucaggcagcc

SEQ ID NO: 1627 - RNA, 21 nt, Artificial Sequence
  Synthetic sequence
cagaccaaggggcugccugag

SEQ ID NO: 1628 - RNA, 21 nt, Artificial Sequence
  Synthetic sequence
caggcagccccuuggucugca

SEQ ID NO: 1629 - RNA, 21 nt, Artificial Sequence
  Synthetic sequence
cagggggacucaggcagcccc

SEQ ID NO: 1630 - RNA, 21 nt, Artificial Sequence
  Synthetic sequence
ccaaggggcugccugaguccc

SEQ ID NO: 1631 - RNA, 21 nt, Artificial Sequence
  Synthetic sequence
ccacagggggacucaggcagc

SEQ ID NO: 1632 - RNA, 21 nt, Artificial Sequence
  Synthetic sequence
ccuccacagggggacucaggc

SEQ ID NO: 1633 - RNA, 21 nt, Artificial Sequence
  Synthetic sequence
ccugagucccccuguggaggc

SEQ ID NO: 1634 - RNA, 21 nt, Artificial Sequence
  Synthetic sequence
cucaggcagccccuuggucug

SEQ ID NO: 1635 - RNA, 21 nt, Artificial Sequence
  Synthetic sequence
cuccacagggggacucaggca

SEQ ID NO: 1636 - RNA, 21 nt, Artificial Sequence
  Synthetic sequence
cugagucccccuguggaggca

SEQ ID NO: 1637 - RNA, 21 nt, Artificial Sequence
  Synthetic sequence
cugccuccacagggggacuca

SEQ ID NO: 1638 - RNA, 21 nt, Artificial Sequence
  Synthetic sequence
cugccugagucccccugugga

SEQ ID NO: 1639 - RNA, 21 nt, Artificial Sequence
  Synthetic sequence
gaccaaggggcugccugaguc

SEQ ID NO: 1640 - RNA, 21 nt, Artificial Sequence
  Synthetic sequence
gacucaggcagccccuugguc

SEQ ID NO: 1641 - RNA, 21 nt, Artificial Sequence
  Synthetic sequence
gcagaccaaggggcugccuga

SEQ ID NO: 1642 - RNA, 21 nt, Artificial Sequence
  Synthetic sequence
gccuccacagggggacucagg

SEQ ID NO: 1643 - RNA, 21 nt, Artificial Sequence
  Synthetic sequence
gccugagucccccuguggagg

SEQ ID NO: 1644 - RNA, 21 nt, Artificial Sequence
  Synthetic sequence
gcugccugagucccccugugg

SEQ ID NO: 1645 - RNA, 21 nt, Artificial Sequence
  Synthetic sequence
ggacucaggcagccccuuggu

SEQ ID NO: 1646 - RNA, 21 nt, Artificial Sequence
  Synthetic sequence
ggcugccugagucccccugug

SEQ ID NO: 1647 - RNA, 21 nt, Artificial Sequence
  Synthetic sequence
gggacucaggcagccccuugg

SEQ ID NO: 1648 - RNA, 21 nt, Artificial Sequence
  Synthetic sequence
gggcugccugagucccccugu

SEQ ID NO: 1649 - RNA, 21 nt, Artificial Sequence
  Synthetic sequence
ggggacucaggcagccccuug

SEQ ID NO: 1650 - RNA, 21 nt, Artificial Sequence
  Synthetic sequence
ggggcugccugagucccccug

SEQ ID NO: 1651 - RNA, 21 nt, Artificial Sequence
  Synthetic sequence
gggggacucaggcagccccuu

SEQ ID NO: 1652 - RNA, 21 nt, Artificial Sequence
  Synthetic sequence
ucaggcagccccuuggucugc

SEQ ID NO: 1653 - RNA, 21 nt, Artificial Sequence
  Synthetic sequence
uccacagggggacucaggcag

SEQ ID NO: 1654 - RNA, 21 nt, Artificial Sequence
  Synthetic sequence
ugcagaccaaggggcugccug

SEQ ID NO: 1655 - RNA, 21 nt, Artificial Sequence
  Synthetic sequence
ugccuccacagggggacucag

SEQ ID NO: 1656 - RNA, 21 nt, Artificial Sequence
  Synthetic sequence
ugccugagucccccuguggag

SEQ ID NO: 1657 - RNA, 21 nt, Artificial Sequence
  Synthetic sequence
uugcagaccaaggggcugccu

SEQ ID NO: 1658 - RNA, 22 nt, Artificial Sequence
  Synthetic sequence
aaggggcugccugagucccccu

SEQ ID NO: 1659 - RNA, 22 nt, Artificial Sequence
  Synthetic sequence
acagggggacucaggcagcccc

SEQ ID NO: 1660 - RNA, 22 nt, Artificial Sequence
  Synthetic sequence
accaaggggcugccugaguccc

SEQ ID NO: 1661 - RNA, 22 nt, Artificial Sequence
  Synthetic sequence
acucaggcagccccuuggucug

SEQ ID NO: 1662 - RNA, 22 nt, Artificial Sequence
  Synthetic sequence
agaccaaggggcugccugaguc

SEQ ID NO: 1663 - RNA, 22 nt, Artificial Sequence
  Synthetic sequence
aggggcugccugagucccccug

SEQ ID NO: 1664 - RNA, 22 nt, Artificial Sequence
  Synthetic sequence
agggggacucaggcagccccuu

SEQ ID NO: 1665 - RNA, 22 nt, Artificial Sequence
  Synthetic sequence
caaggggcugccugaguccccc

SEQ ID NO: 1666 - RNA, 22 nt, Artificial Sequence
  Synthetic sequence
cacagggggacucaggcagccc

SEQ ID NO: 1667 - RNA, 22 nt, Artificial Sequence
  Synthetic sequence
cagaccaaggggcugccugagu

SEQ ID NO: 1668 - RNA, 22 nt, Artificial Sequence
  Synthetic sequence
caggcagccccuuggucugcaa

SEQ ID NO: 1669 - RNA, 22 nt, Artificial Sequence
  Synthetic sequence
cagggggacucaggcagccccu

SEQ ID NO: 1670 - RNA, 22 nt, Artificial Sequence
  Synthetic sequence
ccaaggggcugccugagucccc

SEQ ID NO: 1671 - RNA, 22 nt, Artificial Sequence
  Synthetic sequence
ccacagggggacucaggcagcc

SEQ ID NO: 1672 - RNA, 22 nt, Artificial Sequence
  Synthetic sequence
ccuccacagggggacucaggca

SEQ ID NO: 1673 - RNA, 22 nt, Artificial Sequence
  Synthetic sequence
ccugagucccccuguggaggca

SEQ ID NO: 1674 - RNA, 22 nt, Artificial Sequence
  Synthetic sequence
cucaggcagccccuuggucugc

SEQ ID NO: 1675 - RNA, 22 nt, Artificial Sequence
  Synthetic sequence
cuccacagggggacucaggcag

SEQ ID NO: 1676 - RNA, 22 nt, Artificial Sequence
  Synthetic sequence
cugagucccccuguggaggcag

SEQ ID NO: 1677 - RNA, 22 nt, Artificial Sequence
  Synthetic sequence
cugccuccacagggggacucag

SEQ ID NO: 1678 - RNA, 22 nt, Artificial Sequence
  Synthetic sequence
cugccugagucccccuguggag

SEQ ID NO: 1679 - RNA, 22 nt, Artificial Sequence
  Synthetic sequence
gaccaaggggcugccugagucc

SEQ ID NO: 1680 - RNA, 22 nt, Artificial Sequence
  Synthetic sequence
gacucaggcagccccuuggucu

SEQ ID NO: 1681 - RNA, 22 nt, Artificial Sequence
  Synthetic sequence
gcagaccaaggggcugccugag

SEQ ID NO: 1682 - RNA, 22 nt, Artificial Sequence
  Synthetic sequence
gccuccacagggggacucaggc

SEQ ID NO: 1683 - RNA, 22 nt, Artificial Sequence
  Synthetic sequence
gccugagucccccuguggaggc

SEQ ID NO: 1684 - RNA, 22 nt, Artificial Sequence
  Synthetic sequence
gcugccugagucccccugugga

SEQ ID NO: 1685 - RNA, 22 nt, Artificial Sequence
  Synthetic sequence
ggacucaggcagccccuugguc

SEQ ID NO: 1686 - RNA, 22 nt, Artificial Sequence
  Synthetic sequence
ggcugccugagucccccugugg

SEQ ID NO: 1687 - RNA, 22 nt, Artificial Sequence
  Synthetic sequence
gggacucaggcagccccuuggu

SEQ ID NO: 1688 - RNA, 22 nt, Artificial Sequence
  Synthetic sequence
gggcugccugagucccccugug

SEQ ID NO: 1689 - RNA, 22 nt, Artificial Sequence
  Synthetic sequence
ggggacucaggcagccccuugg

SEQ ID NO: 1690 - RNA, 22 nt, Artificial Sequence
  Synthetic sequence
ggggcugccugagucccccugu

SEQ ID NO: 1691 - RNA, 22 nt, Artificial Sequence
  Synthetic sequence
gggggacucaggcagccccuug

SEQ ID NO: 1692 - RNA, 22 nt, Artificial Sequence
  Synthetic sequence
guugcagaccaaggggcugccu

SEQ ID NO: 1693 - RNA, 22 nt, Artificial Sequence
  Synthetic sequence
ucaggcagccccuuggucugca

SEQ ID NO: 1694 - RNA, 22 nt, Artificial Sequence
  Synthetic sequence
uccacagggggacucaggcagc

SEQ ID NO: 1695 - RNA, 22 nt, Artificial Sequence
  Synthetic sequence
ucugccuccacagggggacuca

SEQ ID NO: 1696 - RNA, 22 nt, Artificial Sequence
  Synthetic sequence
ugcagaccaaggggcugccuga

SEQ ID NO: 1697 - RNA, 22 nt, Artificial Sequence
  Synthetic sequence
ugccuccacagggggacucagg

SEQ ID NO: 1698 - RNA, 22 nt, Artificial Sequence
  Synthetic sequence
ugccugagucccccuguggagg

SEQ ID NO: 1699 - RNA, 22 nt, Artificial Sequence
  Synthetic sequence
uugcagaccaaggggcugccug

SEQ ID NO: 1700 - RNA, 21 nt, Artificial Sequence
  Synthetic sequence
aaaacccccgcuccauuaaaa

SEQ ID NO: 1701 - RNA, 21 nt, Artificial Sequence
  Synthetic sequence
aaacccccgcuccauuaaaaa

SEQ ID NO: 1702 - RNA, 21 nt, Artificial Sequence
  Synthetic sequence
aacauggcaaaacccccgcuc

SEQ ID NO: 1703 - RNA, 21 nt, Artificial Sequence
  Synthetic sequence
aacccccgcuccauuaaaaaa

SEQ ID NO: 1704 - RNA, 21 nt, Artificial Sequence
  Synthetic sequence
acauggcaaaacccccgcucc

SEQ ID NO: 1705 - RNA, 21 nt, Artificial Sequence
  Synthetic sequence
auggcaaaacccccgcuccau

SEQ ID NO: 1706 - RNA, 21 nt, Artificial Sequence
  Synthetic sequence
caaaacccccgcuccauuaaa

SEQ ID NO: 1707 - RNA, 21 nt, Artificial Sequence
  Synthetic sequence
cauggcaaaacccccgcucca

SEQ ID NO: 1708 - RNA, 21 nt, Artificial Sequence
  Synthetic sequence
gcaaaacccccgcuccauuaa

SEQ ID NO: 1709 - RNA, 21 nt, Artificial Sequence
  Synthetic sequence
ggcaaaacccccgcuccauua

SEQ ID NO: 1710 - RNA, 21 nt, Artificial Sequence
  Synthetic sequence
uaauggagcggggguuuugcc

SEQ ID NO: 1711 - RNA, 21 nt, Artificial Sequence
  Synthetic sequence
uggcaaaacccccgcuccauu

SEQ ID NO: 1712 - RNA, 21 nt, Artificial Sequence
  Synthetic sequence
uuaauggagcggggguuuugc

SEQ ID NO: 1713 - RNA, 21 nt, Artificial Sequence
  Synthetic sequence
uuuaauggagcggggguuuug

SEQ ID NO: 1714 - RNA, 21 nt, Artificial Sequence
  Synthetic sequence
uuuuaauggagcggggguuuu

SEQ ID NO: 1715 - RNA, 21 nt, Artificial Sequence
  Synthetic sequence
uuuuuaauggagcggggguuu

SEQ ID NO: 1716 - RNA, 21 nt, Artificial Sequence
  Synthetic sequence
uuuuuuaauggagcggggguu

SEQ ID NO: 1717 - RNA, 22 nt, Artificial Sequence
  Synthetic sequence
aaaacccccgcuccauuaaaaa

SEQ ID NO: 1718 - RNA, 22 nt, Artificial Sequence
  Synthetic sequence
aaacccccgcuccauuaaaaaa

SEQ ID NO: 1719 - RNA, 22 nt, Artificial Sequence
  Synthetic sequence
aacauggcaaaacccccgcucc

SEQ ID NO: 1720 - RNA, 22 nt, Artificial Sequence
  Synthetic sequence
acauggcaaaacccccgcucca

SEQ ID NO: 1721 - RNA, 22 nt, Artificial Sequence
  Synthetic sequence
auggcaaaacccccgcuccauu

SEQ ID NO: 1722 - RNA, 22 nt, Artificial Sequence
  Synthetic sequence
caaaacccccgcuccauuaaaa

SEQ ID NO: 1723 - RNA, 22 nt, Artificial Sequence
  Synthetic sequence
caacauggcaaaacccccgcuc

SEQ ID NO: 1724 - RNA, 22 nt, Artificial Sequence
  Synthetic sequence
cauggcaaaacccccgcuccau

SEQ ID NO: 1725 - RNA, 22 nt, Artificial Sequence
  Synthetic sequence
gcaaaacccccgcuccauuaaa

SEQ ID NO: 1726 - RNA, 22 nt, Artificial Sequence
  Synthetic sequence
ggcaaaacccccgcuccauuaa

SEQ ID NO: 1727 - RNA, 22 nt, Artificial Sequence
  Synthetic sequence
uaauggagcggggguuuugcca

SEQ ID NO: 1728 - RNA, 22 nt, Artificial Sequence
  Synthetic sequence
uggcaaaacccccgcuccauua

SEQ ID NO: 1729 - RNA, 22 nt, Artificial Sequence
  Synthetic sequence
uuaauggagcggggguuuugcc

SEQ ID NO: 1730 - RNA, 22 nt, Artificial Sequence
  Synthetic sequence
uuuaauggagcggggguuuugc

SEQ ID NO: 1731 - RNA, 22 nt, Artificial Sequence
  Synthetic sequence
uuuuaauggagcggggguuuug

SEQ ID NO: 1732 - RNA, 22 nt, Artificial Sequence
  Synthetic sequence
uuuuuaauggagcggggguuuu

SEQ ID NO: 1733 - RNA, 22 nt, Artificial Sequence
  Synthetic sequence
uuuuuuaauggagcggggguuu

SEQ ID NO: 1734 - RNA, 21 nt, Artificial Sequence
  Synthetic sequence
aagccuggcccaguggcuuac

SEQ ID NO: 1735 - RNA, 21 nt, Artificial Sequence
  Synthetic sequence
agccuggcccaguggcuuacg

SEQ ID NO: 1736 - RNA, 21 nt, Artificial Sequence
  Synthetic sequence
aggcguaagccacugggccag

SEQ ID NO: 1737 - RNA, 21 nt, Artificial Sequence
  Synthetic sequence
auugcaggcguaagccacugg

SEQ ID NO: 1738 - RNA, 21 nt, Artificial Sequence
  Synthetic sequence
caagccuggcccaguggcuua

SEQ ID NO: 1739 - RNA, 21 nt, Artificial Sequence
  Synthetic sequence
caggcguaagccacugggcca

SEQ ID NO: 1740 - RNA, 21 nt, Artificial Sequence
  Synthetic sequence
ccaagccuggcccaguggcuu

SEQ ID NO: 1741 - RNA, 21 nt, Artificial Sequence
  Synthetic sequence
ccuggcccaguggcuuacgcc

SEQ ID NO: 1742 - RNA, 21 nt, Artificial Sequence
  Synthetic sequence
cuggcccaguggcuuacgccu

SEQ ID NO: 1743 - RNA, 21 nt, Artificial Sequence
  Synthetic sequence
gauugcaggcguaagccacug

SEQ ID NO: 1744 - RNA, 21 nt, Artificial Sequence
  Synthetic sequence
gcaggcguaagccacugggcc

SEQ ID NO: 1745 - RNA, 21 nt, Artificial Sequence
  Synthetic sequence
gcccaguggcuuacgccugca

SEQ ID NO: 1746 - RNA, 21 nt, Artificial Sequence
  Synthetic sequence
gccuggcccaguggcuuacgc

SEQ ID NO: 1747 - RNA, 21 nt, Artificial Sequence
  Synthetic sequence
ggauugcaggcguaagccacu

SEQ ID NO: 1748 - RNA, 21 nt, Artificial Sequence
  Synthetic sequence
ggcccaguggcuuacgccugc

SEQ ID NO: 1749 - RNA, 21 nt, Artificial Sequence
  Synthetic sequence
ggcguaagccacugggccagg

SEQ ID NO: 1750 - RNA, 21 nt, Artificial Sequence
  Synthetic sequence
ugcaggcguaagccacugggc

SEQ ID NO: 1751 - RNA, 21 nt, Artificial Sequence
  Synthetic sequence
uggcccaguggcuuacgccug

SEQ ID NO: 1752 - RNA, 21 nt, Artificial Sequence
  Synthetic sequence
uugcaggcguaagccacuggg

SEQ ID NO: 1753 - RNA, 22 nt, Artificial Sequence
  Synthetic sequence
aagccuggcccaguggcuuacg

SEQ ID NO: 1754 - RNA, 22 nt, Artificial Sequence
  Synthetic sequence
agccuggcccaguggcuuacgc

SEQ ID NO: 1755 - RNA, 22 nt, Artificial Sequence
  Synthetic sequence
aggcguaagccacugggccagg

SEQ ID NO: 1756 - RNA, 22 nt, Artificial Sequence
  Synthetic sequence
auugcaggcguaagccacuggg

SEQ ID NO: 1757 - RNA, 22 nt, Artificial Sequence
  Synthetic sequence
caagccuggcccaguggcuuac

SEQ ID NO: 1758 - RNA, 22 nt, Artificial Sequence
  Synthetic sequence
caggcguaagccacugggccag

SEQ ID NO: 1759 - RNA, 22 nt, Artificial Sequence
  Synthetic sequence
ccaagccuggcccaguggcuua

SEQ ID NO: 1760 - RNA, 22 nt, Artificial Sequence
  Synthetic sequence
ccaguggcuuacgccugcaauc

SEQ ID NO: 1761 - RNA, 22 nt, Artificial Sequence
  Synthetic sequence
ccuggcccaguggcuuacgccu

SEQ ID NO: 1762 - RNA, 22 nt, Artificial Sequence
  Synthetic sequence
cuggcccaguggcuuacgccug

SEQ ID NO: 1763 - RNA, 22 nt, Artificial Sequence
  Synthetic sequence
cugggauugcaggcguaagcca

SEQ ID NO: 1764 - RNA, 22 nt, Artificial Sequence
  Synthetic sequence
gauugcaggcguaagccacugg

SEQ ID NO: 1765 - RNA, 22 nt, Artificial Sequence
  Synthetic sequence
gcaggcguaagccacugggcca

SEQ ID NO: 1766 - RNA, 22 nt, Artificial Sequence
  Synthetic sequence
gcccaguggcuuacgccugcaa

SEQ ID NO: 1767 - RNA, 22 nt, Artificial Sequence
  Synthetic sequence
gccuggcccaguggcuuacgcc

SEQ ID NO: 1768 - RNA, 22 nt, Artificial Sequence
  Synthetic sequence
ggauugcaggcguaagccacug

SEQ ID NO: 1769 - RNA, 22 nt, Artificial Sequence
  Synthetic sequence
ggcccaguggcuuacgccugca

SEQ ID NO: 1770 - RNA, 22 nt, Artificial Sequence
  Synthetic sequence
ggcguaagccacugggccaggc

SEQ ID NO: 1771 - RNA, 22 nt, Artificial Sequence
  Synthetic sequence
gggauugcaggcguaagccacu

SEQ ID NO: 1772 - RNA, 22 nt, Artificial Sequence
  Synthetic sequence
uccaagccuggcccaguggcuu

SEQ ID NO: 1773 - RNA, 22 nt, Artificial Sequence
  Synthetic sequence
ugcaggcguaagccacugggcc

SEQ ID NO: 1774 - RNA, 22 nt, Artificial Sequence
  Synthetic sequence
uggcccaguggcuuacgccugc

SEQ ID NO: 1775 - RNA, 22 nt, Artificial Sequence
  Synthetic sequence
uugcaggcguaagccacugggc

SEQ ID NO: 1776 - RNA, 21 nt, Artificial Sequence
  Synthetic sequence
agacguaagccacugggccag

SEQ ID NO: 1777 - RNA, 21 nt, Artificial Sequence
  Synthetic sequence
auugcagacguaagccacugg

SEQ ID NO: 1778 - RNA, 21 nt, Artificial Sequence
  Synthetic sequence
cagacguaagccacugggcca

SEQ ID NO: 1779 - RNA, 21 nt, Artificial Sequence
  Synthetic sequence
ccaguggcuuacgucugcaau

SEQ ID NO: 1780 - RNA, 21 nt, Artificial Sequence
  Synthetic sequence
cccaguggcuuacgucugcaa

SEQ ID NO: 1781 - RNA, 21 nt, Artificial Sequence
  Synthetic sequence
ccuggcccaguggcuuacguc

SEQ ID NO: 1782 - RNA, 21 nt, Artificial Sequence
  Synthetic sequence
cuggcccaguggcuuacgucu

SEQ ID NO: 1783 - RNA, 21 nt, Artificial Sequence
  Synthetic sequence
gacguaagccacugggccagg

SEQ ID NO: 1784 - RNA, 21 nt, Artificial Sequence
  Synthetic sequence
gauugcagacguaagccacug

SEQ ID NO: 1785 - RNA, 21 nt, Artificial Sequence
  Synthetic sequence
gcagacguaagccacugggcc

SEQ ID NO: 1786 - RNA, 21 nt, Artificial Sequence
  Synthetic sequence
gcccaguggcuuacgucugca

SEQ ID NO: 1787 - RNA, 21 nt, Artificial Sequence
  Synthetic sequence
gccuggcccaguggcuuacgu

SEQ ID NO: 1788 - RNA, 21 nt, Artificial Sequence
  Synthetic sequence
ggauugcagacguaagccacu

SEQ ID NO: 1789 - RNA, 21 nt, Artificial Sequence
  Synthetic sequence
ggcccaguggcuuacgucugc

SEQ ID NO: 1790 - RNA, 21 nt, Artificial Sequence
  Synthetic sequence
gggauugcagacguaagccac

SEQ ID NO: 1791 - RNA, 21 nt, Artificial Sequence
  Synthetic sequence
ugcagacguaagccacugggc

SEQ ID NO: 1792 - RNA, 21 nt, Artificial Sequence
  Synthetic sequence
uggcccaguggcuuacgucug

SEQ ID NO: 1793 - RNA, 21 nt, Artificial Sequence
  Synthetic sequence
ugggauugcagacguaagcca

SEQ ID NO: 1794 - RNA, 21 nt, Artificial Sequence
  Synthetic sequence
uugcagacguaagccacuggg

SEQ ID NO: 1795 - RNA, 22 nt, Artificial Sequence
  Synthetic sequence
agacguaagccacugggccagg

SEQ ID NO: 1796 - RNA, 22 nt, Artificial Sequence
  Synthetic sequence
agccuggcccaguggcuuacgu

SEQ ID NO: 1797 - RNA, 22 nt, Artificial Sequence
  Synthetic sequence
auugcagacguaagccacuggg

SEQ ID NO: 1798 - RNA, 22 nt, Artificial Sequence
  Synthetic sequence
cagacguaagccacugggccag

SEQ ID NO: 1799 - RNA, 22 nt, Artificial Sequence
  Synthetic sequence
ccaguggcuuacgucugcaauc

SEQ ID NO: 1800 - RNA, 22 nt, Artificial Sequence
  Synthetic sequence
cccaguggcuuacgucugcaau

SEQ ID NO: 1801 - RNA, 22 nt, Artificial Sequence
  Synthetic sequence
ccuggcccaguggcuuacgucu

SEQ ID NO: 1802 - RNA, 22 nt, Artificial Sequence
  Synthetic sequence
cuggcccaguggcuuacgucug

SEQ ID NO: 1803 - RNA, 22 nt, Artificial Sequence
  Synthetic sequence
cugggauugcagacguaagcca

SEQ ID NO: 1804 - RNA, 22 nt, Artificial Sequence
  Synthetic sequence
gacguaagccacugggccaggc

SEQ ID NO: 1805 - RNA, 22 nt, Artificial Sequence
  Synthetic sequence
gauugcagacguaagccacugg

SEQ ID NO: 1806 - RNA, 22 nt, Artificial Sequence
  Synthetic sequence
gcagacguaagccacugggcca

SEQ ID NO: 1807 - RNA, 22 nt, Artificial Sequence
  Synthetic sequence
gcccaguggcuuacgucugcaa

SEQ ID NO: 1808 - RNA, 22 nt, Artificial Sequence
  Synthetic sequence
gccuggcccaguggcuuacguc

SEQ ID NO: 1809 - RNA, 22 nt, Artificial Sequence
  Synthetic sequence
ggauugcagacguaagccacug

SEQ ID NO: 1810 - RNA, 22 nt, Artificial Sequence
  Synthetic sequence
ggcccaguggcuuacgucugca

SEQ ID NO: 1811 - RNA, 22 nt, Artificial Sequence
  Synthetic sequence
gggauugcagacguaagccacu

SEQ ID NO: 1812 - RNA, 22 nt, Artificial Sequence
  Synthetic sequence
ugcagacguaagccacugggcc

SEQ ID NO: 1813 - RNA, 22 nt, Artificial Sequence
  Synthetic sequence
uggcccaguggcuuacgucugc

SEQ ID NO: 1814 - RNA, 22 nt, Artificial Sequence
  Synthetic sequence
ugggauugcagacguaagccac

SEQ ID NO: 1815 - RNA, 22 nt, Artificial Sequence
  Synthetic sequence
uugcagacguaagccacugggc

SEQ ID NO: 1816 - RNA, 21 nt, Artificial Sequence
  Synthetic sequence
gcagacuagucuugaacuccc

SEQ ID NO: 1817 - RNA, 21 nt, Artificial Sequence
  Synthetic sequence
ggcagacuagucuugaacucc

SEQ ID NO: 1818 - RNA, 21 nt, Artificial Sequence
  Synthetic sequence
ggucgggaguucaagacuagu

SEQ ID NO: 1819 - RNA, 22 nt, Artificial Sequence
  Synthetic sequence
aggucgggaguucaagacuagu

SEQ ID NO: 1820 - RNA, 22 nt, Artificial Sequence
  Synthetic sequence
gcagacuagucuugaacucccg

SEQ ID NO: 1821 - RNA, 22 nt, Artificial Sequence
  Synthetic sequence
ggcagacuagucuugaacuccc

SEQ ID NO: 1822 - RNA, 22 nt, Artificial Sequence
  Synthetic sequence
ggucgggaguucaagacuaguc

SEQ ID NO: 1823 - RNA, 22 nt, Artificial Sequence
  Synthetic sequence
uggcagacuagucuugaacucc

SEQ ID NO: 1824 - RNA, 21 nt, Artificial Sequence
  Synthetic sequence
acuagucuugaacucccgauc

SEQ ID NO: 1825 - RNA, 21 nt, Artificial Sequence
  Synthetic sequence
agacuagucuugaacucccga

SEQ ID NO: 1826 - RNA, 21 nt, Artificial Sequence
  Synthetic sequence
agaucgggaguucaagacuag

SEQ ID NO: 1827 - RNA, 21 nt, Artificial Sequence
  Synthetic sequence
cagacuagucuugaacucccg

SEQ ID NO: 1828 - RNA, 21 nt, Artificial Sequence
  Synthetic sequence
cugagaucgggaguucaagac

SEQ ID NO: 1829 - RNA, 21 nt, Artificial Sequence
  Synthetic sequence
gacuagucuugaacucccgau

SEQ ID NO: 1830 - RNA, 21 nt, Artificial Sequence
  Synthetic sequence
gagaucgggaguucaagacua

SEQ ID NO: 1831 - RNA, 21 nt, Artificial Sequence
  Synthetic sequence
gaucgggaguucaagacuagu

SEQ ID NO: 1832 - RNA, 21 nt, Artificial Sequence
  Synthetic sequence
ugagaucgggaguucaagacu

SEQ ID NO: 1833 - RNA, 22 nt, Artificial Sequence
  Synthetic sequence
acuagucuugaacucccgaucu

SEQ ID NO: 1834 - RNA, 22 nt, Artificial Sequence
  Synthetic sequence
agacuagucuugaacucccgau

SEQ ID NO: 1835 - RNA, 22 nt, Artificial Sequence
  Synthetic sequence
agaucgggaguucaagacuagu

SEQ ID NO: 1836 - RNA, 22 nt, Artificial Sequence
  Synthetic sequence
cagacuagucuugaacucccga

SEQ ID NO: 1837 - RNA, 22 nt, Artificial Sequence
  Synthetic sequence
ccugagaucgggaguucaagac

SEQ ID NO: 1838 - RNA, 22 nt, Artificial Sequence
  Synthetic sequence
cugagaucgggaguucaagacu

SEQ ID NO: 1839 - RNA, 22 nt, Artificial Sequence
  Synthetic sequence
gacuagucuugaacucccgauc

SEQ ID NO: 1840 - RNA, 22 nt, Artificial Sequence
  Synthetic sequence
gagaucgggaguucaagacuag

SEQ ID NO: 1841 - RNA, 22 nt, Artificial Sequence
  Synthetic sequence
gaucgggaguucaagacuaguc

SEQ ID NO: 1842 - RNA, 22 nt, Artificial Sequence
  Synthetic sequence
ugagaucgggaguucaagacua

SEQ ID NO: 1843 - RNA, 21 nt, Artificial Sequence
  Synthetic sequence
ccgccugccugggccucccaa

SEQ ID NO: 1844 - RNA, 21 nt, Artificial Sequence
  Synthetic sequence
cgccugccugggccucccaaa

SEQ ID NO: 1845 - RNA, 21 nt, Artificial Sequence
  Synthetic sequence
cucuuugggaggcccaggcag

SEQ ID NO: 1846 - RNA, 21 nt, Artificial Sequence
  Synthetic sequence
gcucuuugggaggcccaggca

SEQ ID NO: 1847 - RNA, 21 nt, Artificial Sequence
  Synthetic sequence
uccgccugccugggccuccca

SEQ ID NO: 1848 - RNA, 22 nt, Artificial Sequence
  Synthetic sequence
agcucuuugggaggcccaggca

SEQ ID NO: 1849 - RNA, 22 nt, Artificial Sequence
  Synthetic sequence
auccgccugccugggccuccca

SEQ ID NO: 1850 - RNA, 22 nt, Artificial Sequence
  Synthetic sequence
ccgccugccugggccucccaaa

SEQ ID NO: 1851 - RNA, 22 nt, Artificial Sequence
  Synthetic sequence
cgccugccugggccucccaaag

SEQ ID NO: 1852 - RNA, 22 nt, Artificial Sequence
  Synthetic sequence
cucuuugggaggcccaggcagg

SEQ ID NO: 1853 - RNA, 22 nt, Artificial Sequence
  Synthetic sequence
gcucuuugggaggcccaggcag

SEQ ID NO: 1854 - RNA, 22 nt, Artificial Sequence
  Synthetic sequence
uccgccugccugggccucccaa

SEQ ID NO: 1855 - RNA, 21 nt, Artificial Sequence
  Synthetic sequence
aaaacacaauguggggaaguc

SEQ ID NO: 1856 - RNA, 21 nt, Artificial Sequence
  Synthetic sequence
aaacacaauguggggaaguca

SEQ ID NO: 1857 - RNA, 21 nt, Artificial Sequence
  Synthetic sequence
aacacaauguggggaagucac

SEQ ID NO: 1858 - RNA, 21 nt, Artificial Sequence
  Synthetic sequence
aagugacuuccccacauugug

SEQ ID NO: 1859 - RNA, 21 nt, Artificial Sequence
  Synthetic sequence
acacaauguggggaagucacu

SEQ ID NO: 1860 - RNA, 21 nt, Artificial Sequence
  Synthetic sequence
agaagugacuuccccacauug

SEQ ID NO: 1861 - RNA, 21 nt, Artificial Sequence
  Synthetic sequence
agugacuuccccacauugugu

SEQ ID NO: 1862 - RNA, 21 nt, Artificial Sequence
  Synthetic sequence
cagaagugacuuccccacauu

SEQ ID NO: 1863 - RNA, 21 nt, Artificial Sequence
  Synthetic sequence
gaagugacuuccccacauugu

SEQ ID NO: 1864 - RNA, 21 nt, Artificial Sequence
  Synthetic sequence
gacuuccccacauuguguuuu

SEQ ID NO: 1865 - RNA, 21 nt, Artificial Sequence
  Synthetic sequence
gcagaagugacuuccccacau

SEQ ID NO: 1866 - RNA, 21 nt, Artificial Sequence
  Synthetic sequence
gugacuuccccacauuguguu

SEQ ID NO: 1867 - RNA, 21 nt, Artificial Sequence
  Synthetic sequence
ugacuuccccacauuguguuu

SEQ ID NO: 1868 - RNA, 22 nt, Artificial Sequence
  Synthetic sequence
aaaaacacaauguggggaaguc

SEQ ID NO: 1869 - RNA, 22 nt, Artificial Sequence
  Synthetic sequence
aaaacacaauguggggaaguca

SEQ ID NO: 1870 - RNA, 22 nt, Artificial Sequence
  Synthetic sequence
aaacacaauguggggaagucac

SEQ ID NO: 1871 - RNA, 22 nt, Artificial Sequence
  Synthetic sequence
aacacaauguggggaagucacu

SEQ ID NO: 1872 - RNA, 22 nt, Artificial Sequence
  Synthetic sequence
aagugacuuccccacauugugu

SEQ ID NO: 1873 - RNA, 22 nt, Artificial Sequence
  Synthetic sequence
acacaauguggggaagucacuu

SEQ ID NO: 1874 - RNA, 22 nt, Artificial Sequence
  Synthetic sequence
agaagugacuuccccacauugu

SEQ ID NO: 1875 - RNA, 22 nt, Artificial Sequence
  Synthetic sequence
agcagaagugacuuccccacau

SEQ ID NO: 1876 - RNA, 22 nt, Artificial Sequence
  Synthetic sequence
agugacuuccccacauuguguu

SEQ ID NO: 1877 - RNA, 22 nt, Artificial Sequence
  Synthetic sequence
cagaagugacuuccccacauug

SEQ ID NO: 1878 - RNA, 22 nt, Artificial Sequence
  Synthetic sequence
gaagugacuuccccacauugug

SEQ ID NO: 1879 - RNA, 22 nt, Artificial Sequence
  Synthetic sequence
gacuuccccacauuguguuuuu

SEQ ID NO: 1880 - RNA, 22 nt, Artificial Sequence
  Synthetic sequence
gcagaagugacuuccccacauu

SEQ ID NO: 1881 - RNA, 22 nt, Artificial Sequence
  Synthetic sequence
gugacuuccccacauuguguuu

SEQ ID NO: 1882 - RNA, 22 nt, Artificial Sequence
  Synthetic sequence
ugacuuccccacauuguguuuu

SEQ ID NO: 1883 - RNA, 21 nt, Artificial Sequence
  Synthetic sequence
aagugacuuccccacauugua

SEQ ID NO: 1884 - RNA, 21 nt, Artificial Sequence
  Synthetic sequence
aauacaauguggggaagucac

SEQ ID NO: 1885 - RNA, 21 nt, Artificial Sequence
  Synthetic sequence
agugacuuccccacauuguau

SEQ ID NO: 1886 - RNA, 21 nt, Artificial Sequence
  Synthetic sequence
auacaauguggggaagucacu

SEQ ID NO: 1887 - RNA, 21 nt, Artificial Sequence
  Synthetic sequence
gugacuuccccacauuguauu

SEQ ID NO: 1888 - RNA, 22 nt, Artificial Sequence
  Synthetic sequence
aaauacaauguggggaagucac

SEQ ID NO: 1889 - RNA, 22 nt, Artificial Sequence
  Synthetic sequence
aagugacuuccccacauuguau

SEQ ID NO: 1890 - RNA, 22 nt, Artificial Sequence
  Synthetic sequence
aauacaauguggggaagucacu

SEQ ID NO: 1891 - RNA, 22 nt, Artificial Sequence
  Synthetic sequence
agugacuuccccacauuguauu

SEQ ID NO: 1892 - RNA, 22 nt, Artificial Sequence
  Synthetic sequence
auacaauguggggaagucacuu

SEQ ID NO: 1893 - RNA, 22 nt, Artificial Sequence
  Synthetic sequence
gaagugacuuccccacauugua

SEQ ID NO: 1894 - RNA, 22 nt, Artificial Sequence
  Synthetic sequence
gugacuuccccacauuguauuu

SEQ ID NO: 1895 - RNA, 22 nt, Artificial Sequence
  Synthetic sequence
ucaaggcgggcggaucacgagu

SEQ ID NO: 1896 - RNA, 21 nt, Artificial Sequence
  Synthetic sequence
acgacagagcaagacucuguc

SEQ ID NO: 1897 - RNA, 21 nt, Artificial Sequence
  Synthetic sequence
gacgacagagcaagacucugu

SEQ ID NO: 1898 - RNA, 21 nt, Artificial Sequence
  Synthetic sequence
ggacgacagagcaagacucug

SEQ ID NO: 1899 - RNA, 21 nt, Artificial Sequence
  Synthetic sequence
ugcgacagagucuugcucugu

SEQ ID NO: 1900 - RNA, 21 nt, Artificial Sequence
  Synthetic sequence
uugcgacagagucuugcucug

SEQ ID NO: 1901 - RNA, 22 nt, Artificial Sequence
  Synthetic sequence
acgacagagcaagacucugucg

SEQ ID NO: 1902 - RNA, 22 nt, Artificial Sequence
  Synthetic sequence
gacgacagagcaagacucuguc

SEQ ID NO: 1903 - RNA, 22 nt, Artificial Sequence
  Synthetic sequence
ggacgacagagcaagacucugu

SEQ ID NO: 1904 - RNA, 22 nt, Artificial Sequence
  Synthetic sequence
ugcgacagagucuugcucuguc

SEQ ID NO: 1905 - RNA, 22 nt, Artificial Sequence
  Synthetic sequence
uggacgacagagcaagacucug

SEQ ID NO: 1906 - RNA, 22 nt, Artificial Sequence
  Synthetic sequence
uugcgacagagucuugcucugu

SEQ ID NO: 1907 - RNA, 22 nt, Artificial Sequence
  Synthetic sequence
uuugcgacagagucuugcucug

SEQ ID NO: 1908 - RNA, 21 nt, Artificial Sequence
  Synthetic sequence
aaaagccgggggaaccucgug

SEQ ID NO: 1909 - RNA, 21 nt, Artificial Sequence
  Synthetic sequence
aaagccgggggaaccucgugu

SEQ ID NO: 1910 - RNA, 21 nt, Artificial Sequence
  Synthetic sequence
aagagaaaagccgggggaacc

SEQ ID NO: 1911 - RNA, 21 nt, Artificial Sequence
  Synthetic sequence
aagccgggggaaccucgugug

SEQ ID NO: 1912 - RNA, 21 nt, Artificial Sequence
  Synthetic sequence
acacgagguucccccggcuuu

SEQ ID NO: 1913 - RNA, 21 nt, Artificial Sequence
  Synthetic sequence
acgagguucccccggcuuuuc

SEQ ID NO: 1914 - RNA, 21 nt, Artificial Sequence
  Synthetic sequence
agaaaagccgggggaaccucg

SEQ ID NO: 1915 - RNA, 21 nt, Artificial Sequence
  Synthetic sequence
agagaaaagccgggggaaccu

SEQ ID NO: 1916 - RNA, 21 nt, Artificial Sequence
  Synthetic sequence
agcacacgagguucccccggc

SEQ ID NO: 1917 - RNA, 21 nt, Artificial Sequence
  Synthetic sequence
agcagcacacgagguuccccc

SEQ ID NO: 1918 - RNA, 21 nt, Artificial Sequence
  Synthetic sequence
agccgggggaaccucgugugc

SEQ ID NO: 1919 - RNA, 21 nt, Artificial Sequence
  Synthetic sequence
agguucccccggcuuuucucu

SEQ ID NO: 1920 - RNA, 21 nt, Artificial Sequence
  Synthetic sequence
auccauggugaagagaaaagc

SEQ ID NO: 1921 - RNA, 21 nt, Artificial Sequence
  Synthetic sequence
auggugaagagaaaagccggg

SEQ ID NO: 1922 - RNA, 21 nt, Artificial Sequence
  Synthetic sequence
cacacgagguucccccggcuu

SEQ ID NO: 1923 - RNA, 21 nt, Artificial Sequence
  Synthetic sequence
cacgagguucccccggcuuuu

SEQ ID NO: 1924 - RNA, 21 nt, Artificial Sequence
  Synthetic sequence
cagcacacgagguucccccgg

SEQ ID NO: 1925 - RNA, 21 nt, Artificial Sequence
  Synthetic sequence
cauggugaagagaaaagccgg

SEQ ID NO: 1926 - RNA, 21 nt, Artificial Sequence
  Synthetic sequence
ccauggugaagagaaaagccg

SEQ ID NO: 1927 - RNA, 21 nt, Artificial Sequence
  Synthetic sequence
cccccggcuuuucucuucacc

SEQ ID NO: 1928 - RNA, 21 nt, Artificial Sequence
  Synthetic sequence
ccccggcuuuucucuucacca

SEQ ID NO: 1929 - RNA, 21 nt, Artificial Sequence
  Synthetic sequence
cccggcuuuucucuucaccau

SEQ ID NO: 1930 - RNA, 21 nt, Artificial Sequence
  Synthetic sequence
ccggcuuuucucuucaccaug

SEQ ID NO: 1931 - RNA, 21 nt, Artificial Sequence
  Synthetic sequence
ccgggggaaccucgugugcug

SEQ ID NO: 1932 - RNA, 21 nt, Artificial Sequence
  Synthetic sequence
cgagguucccccggcuuuucu

SEQ ID NO: 1933 - RNA, 21 nt, Artificial Sequence
  Synthetic sequence
cggcuuuucucuucaccaugg

SEQ ID NO: 1934 - RNA, 21 nt, Artificial Sequence
  Synthetic sequence
gaaaagccgggggaaccucgu

SEQ ID NO: 1935 - RNA, 21 nt, Artificial Sequence
  Synthetic sequence
gaagagaaaagccgggggaac

SEQ ID NO: 1936 - RNA, 21 nt, Artificial Sequence
  Synthetic sequence
gagaaaagccgggggaaccuc

SEQ ID NO: 1937 - RNA, 21 nt, Artificial Sequence
  Synthetic sequence
gagcagcacacgagguucccc

SEQ ID NO: 1938 - RNA, 21 nt, Artificial Sequence
  Synthetic sequence
gagguucccccggcuuuucuc

SEQ ID NO: 1939 - RNA, 21 nt, Artificial Sequence
  Synthetic sequence
gauccauggugaagagaaaag

SEQ ID NO: 1940 - RNA, 21 nt, Artificial Sequence
  Synthetic sequence
gcacacgagguucccccggcu

SEQ ID NO: 1941 - RNA, 21 nt, Artificial Sequence
  Synthetic sequence
gcagcacacgagguucccccg

SEQ ID NO: 1942 - RNA, 21 nt, Artificial Sequence
  Synthetic sequence
gccgggggaaccucgugugcu

SEQ ID NO: 1943 - RNA, 21 nt, Artificial Sequence
  Synthetic sequence
ggagcagcacacgagguuccc

SEQ ID NO: 1944 - RNA, 21 nt, Artificial Sequence
  Synthetic sequence
gggagcagcacacgagguucc

SEQ ID NO: 1945 - RNA, 21 nt, Artificial Sequence
  Synthetic sequence
ggugaagagaaaagccggggg

SEQ ID NO: 1946 - RNA, 21 nt, Artificial Sequence
  Synthetic sequence
gguucccccggcuuuucucuu

SEQ ID NO: 1947 - RNA, 21 nt, Artificial Sequence
  Synthetic sequence
gugaagagaaaagccggggga

SEQ ID NO: 1948 - RNA, 21 nt, Artificial Sequence
  Synthetic sequence
guucccccggcuuuucucuuc

SEQ ID NO: 1949 - RNA, 21 nt, Artificial Sequence
  Synthetic sequence
uccauggugaagagaaaagcc

SEQ ID NO: 1950 - RNA, 21 nt, Artificial Sequence
  Synthetic sequence
ucccccggcuuuucucuucac

SEQ ID NO: 1951 - RNA, 21 nt, Artificial Sequence
  Synthetic sequence
ugaagagaaaagccgggggaa

SEQ ID NO: 1952 - RNA, 21 nt, Artificial Sequence
  Synthetic sequence
uggugaagagaaaagccgggg

SEQ ID NO: 1953 - RNA, 21 nt, Artificial Sequence
  Synthetic sequence
uucccccggcuuuucucuuca

SEQ ID NO: 1954 - RNA, 22 nt, Artificial Sequence
  Synthetic sequence
aaaagccgggggaaccucgugu

SEQ ID NO: 1955 - RNA, 22 nt, Artificial Sequence
  Synthetic sequence
aaagccgggggaaccucgugug

SEQ ID NO: 1956 - RNA, 22 nt, Artificial Sequence
  Synthetic sequence
aagagaaaagccgggggaaccu

SEQ ID NO: 1957 - RNA, 22 nt, Artificial Sequence
  Synthetic sequence
aagccgggggaaccucgugugc

SEQ ID NO: 1958 - RNA, 22 nt, Artificial Sequence
  Synthetic sequence
acacgagguucccccggcuuuu

SEQ ID NO: 1959 - RNA, 22 nt, Artificial Sequence
  Synthetic sequence
acgagguucccccggcuuuucu

SEQ ID NO: 1960 - RNA, 22 nt, Artificial Sequence
  Synthetic sequence
agaaaagccgggggaaccucgu

SEQ ID NO: 1961 - RNA, 22 nt, Artificial Sequence
  Synthetic sequence
agagaaaagccgggggaaccuc

SEQ ID NO: 1962 - RNA, 22 nt, Artificial Sequence
  Synthetic sequence
agcacacgagguucccccggcu

SEQ ID NO: 1963 - RNA, 22 nt, Artificial Sequence
  Synthetic sequence
agcagcacacgagguucccccg

SEQ ID NO: 1964 - RNA, 22 nt, Artificial Sequence
  Synthetic sequence
agccgggggaaccucgugugcu

SEQ ID NO: 1965 - RNA, 22 nt, Artificial Sequence
  Synthetic sequence
agguucccccggcuuuucucuu

SEQ ID NO: 1966 - RNA, 22 nt, Artificial Sequence
  Synthetic sequence
auccauggugaagagaaaagcc

SEQ ID NO: 1967 - RNA, 22 nt, Artificial Sequence
  Synthetic sequence
auggugaagagaaaagccgggg

SEQ ID NO: 1968 - RNA, 22 nt, Artificial Sequence
  Synthetic sequence
cacacgagguucccccggcuuu

SEQ ID NO: 1969 - RNA, 22 nt, Artificial Sequence
  Synthetic sequence
cacgagguucccccggcuuuuc

SEQ ID NO: 1970 - RNA, 22 nt, Artificial Sequence
  Synthetic sequence
cagcacacgagguucccccggc

SEQ ID NO: 1971 - RNA, 22 nt, Artificial Sequence
  Synthetic sequence
cauggugaagagaaaagccggg

SEQ ID NO: 1972 - RNA, 22 nt, Artificial Sequence
  Synthetic sequence
ccauggugaagagaaaagccgg

SEQ ID NO: 1973 - RNA, 22 nt, Artificial Sequence
  Synthetic sequence
cccccggcuuuucucuucacca

SEQ ID NO: 1974 - RNA, 22 nt, Artificial Sequence
  Synthetic sequence
ccccggcuuuucucuucaccau

SEQ ID NO: 1975 - RNA, 22 nt, Artificial Sequence
  Synthetic sequence
cccggcuuuucucuucaccaug

SEQ ID NO: 1976 - RNA, 22 nt, Artificial Sequence
  Synthetic sequence
ccggcuuuucucuucaccaugg

SEQ ID NO: 1977 - RNA, 22 nt, Artificial Sequence
  Synthetic sequence
ccgggggaaccucgugugcugc

SEQ ID NO: 1978 - RNA, 22 nt, Artificial Sequence
  Synthetic sequence
cgagguucccccggcuuuucuc

SEQ ID NO: 1979 - RNA, 22 nt, Artificial Sequence
  Synthetic sequence
cggcuuuucucuucaccaugga

SEQ ID NO: 1980 - RNA, 22 nt, Artificial Sequence
  Synthetic sequence
gaaaagccgggggaaccucgug

SEQ ID NO: 1981 - RNA, 22 nt, Artificial Sequence
  Synthetic sequence
gaagagaaaagccgggggaacc

SEQ ID NO: 1982 - RNA, 22 nt, Artificial Sequence
  Synthetic sequence
gagaaaagccgggggaaccucg

SEQ ID NO: 1983 - RNA, 22 nt, Artificial Sequence
  Synthetic sequence
gagcagcacacgagguuccccc

SEQ ID NO: 1984 - RNA, 22 nt, Artificial Sequence
  Synthetic sequence
gagguucccccggcuuuucucu

SEQ ID NO: 1985 - RNA, 22 nt, Artificial Sequence
  Synthetic sequence
gauccauggugaagagaaaagc

SEQ ID NO: 1986 - RNA, 22 nt, Artificial Sequence
  Synthetic sequence
gcacacgagguucccccggcuu

SEQ ID NO: 1987 - RNA, 22 nt, Artificial Sequence
  Synthetic sequence
gcagcacacgagguucccccgg

SEQ ID NO: 1988 - RNA, 22 nt, Artificial Sequence
  Synthetic sequence
gccgggggaaccucgugugcug

SEQ ID NO: 1989 - RNA, 22 nt, Artificial Sequence
  Synthetic sequence
ggagcagcacacgagguucccc

SEQ ID NO: 1990 - RNA, 22 nt, Artificial Sequence
  Synthetic sequence
gggagcagcacacgagguuccc

SEQ ID NO: 1991 - RNA, 22 nt, Artificial Sequence
  Synthetic sequence
ggggagcagcacacgagguucc

SEQ ID NO: 1992 - RNA, 22 nt, Artificial Sequence
  Synthetic sequence
ggugaagagaaaagccggggga

SEQ ID NO: 1993 - RNA, 22 nt, Artificial Sequence
  Synthetic sequence
gguucccccggcuuuucucuuc

SEQ ID NO: 1994 - RNA, 22 nt, Artificial Sequence
  Synthetic sequence
gugaagagaaaagccgggggaa

SEQ ID NO: 1995 - RNA, 22 nt, Artificial Sequence
  Synthetic sequence
guucccccggcuuuucucuuca

SEQ ID NO: 1996 - RNA, 22 nt, Artificial Sequence
  Synthetic sequence
uccauggugaagagaaaagccg

SEQ ID NO: 1997 - RNA, 22 nt, Artificial Sequence
  Synthetic sequence
ucccccggcuuuucucuucacc

SEQ ID NO: 1998 - RNA, 22 nt, Artificial Sequence
  Synthetic sequence
ugaagagaaaagccgggggaac

SEQ ID NO: 1999 - RNA, 22 nt, Artificial Sequence
  Synthetic sequence
ugauccauggugaagagaaaag

SEQ ID NO: 2000 - RNA, 22 nt, Artificial Sequence
  Synthetic sequence
uggugaagagaaaagccggggg

SEQ ID NO: 2001 - RNA, 22 nt, Artificial Sequence
  Synthetic sequence
uucccccggcuuuucucuucac

SEQ ID NO: 2002 - RNA, 21 nt, Artificial Sequence
  Synthetic sequence
aaaagcagggggaaccucgug

SEQ ID NO: 2003 - RNA, 21 nt, Artificial Sequence
  Synthetic sequence
aaagcagggggaaccucgugu

SEQ ID NO: 2004 - RNA, 21 nt, Artificial Sequence
  Synthetic sequence
aagagaaaagcagggggaacc

SEQ ID NO: 2005 - RNA, 21 nt, Artificial Sequence
  Synthetic sequence
aagcagggggaaccucgugug

SEQ ID NO: 2006 - RNA, 21 nt, Artificial Sequence
  Synthetic sequence
acacgagguucccccugcuuu

SEQ ID NO: 2007 - RNA, 21 nt, Artificial Sequence
  Synthetic sequence
acgagguucccccugcuuuuc

SEQ ID NO: 2008 - RNA, 21 nt, Artificial Sequence
  Synthetic sequence
agaaaagcagggggaaccucg

SEQ ID NO: 2009 - RNA, 21 nt, Artificial Sequence
  Synthetic sequence
agagaaaagcagggggaaccu

SEQ ID NO: 2010 - RNA, 21 nt, Artificial Sequence
  Synthetic sequence
agcacacgagguucccccugc

SEQ ID NO: 2011 - RNA, 21 nt, Artificial Sequence
  Synthetic sequence
agcagggggaaccucgugugc

SEQ ID NO: 2012 - RNA, 21 nt, Artificial Sequence
  Synthetic sequence
agguucccccugcuuuucucu

SEQ ID NO: 2013 - RNA, 21 nt, Artificial Sequence
  Synthetic sequence
auggugaagagaaaagcaggg

SEQ ID NO: 2014 - RNA, 21 nt, Artificial Sequence
  Synthetic sequence
cacacgagguucccccugcuu

SEQ ID NO: 2015 - RNA, 21 nt, Artificial Sequence
  Synthetic sequence
cacgagguucccccugcuuuu

SEQ ID NO: 2016 - RNA, 21 nt, Artificial Sequence
  Synthetic sequence
cagcacacgagguucccccug

SEQ ID NO: 2017 - RNA, 21 nt, Artificial Sequence
  Synthetic sequence
cagggggaaccucgugugcug

SEQ ID NO: 2018 - RNA, 21 nt, Artificial Sequence
  Synthetic sequence
cauggugaagagaaaagcagg

SEQ ID NO: 2019 - RNA, 21 nt, Artificial Sequence
  Synthetic sequence
ccauggugaagagaaaagcag

SEQ ID NO: 2020 - RNA, 21 nt, Artificial Sequence
  Synthetic sequence
cccccugcuuuucucuucacc

SEQ ID NO: 2021 - RNA, 21 nt, Artificial Sequence
  Synthetic sequence
ccccugcuuuucucuucacca

SEQ ID NO: 2022 - RNA, 21 nt, Artificial Sequence
  Synthetic sequence
cccugcuuuucucuucaccau

SEQ ID NO: 2023 - RNA, 21 nt, Artificial Sequence
  Synthetic sequence
ccugcuuuucucuucaccaug

SEQ ID NO: 2024 - RNA, 21 nt, Artificial Sequence
  Synthetic sequence
cgagguucccccugcuuuucu

SEQ ID NO: 2025 - RNA, 21 nt, Artificial Sequence
  Synthetic sequence
cugcuuuucucuucaccaugg

SEQ ID NO: 2026 - RNA, 21 nt, Artificial Sequence
  Synthetic sequence
gaaaagcagggggaaccucgu

SEQ ID NO: 2027 - RNA, 21 nt, Artificial Sequence
  Synthetic sequence
gaagagaaaagcagggggaac

SEQ ID NO: 2028 - RNA, 21 nt, Artificial Sequence
  Synthetic sequence
gagaaaagcagggggaaccuc

SEQ ID NO: 2029 - RNA, 21 nt, Artificial Sequence
  Synthetic sequence
gagguucccccugcuuuucuc

SEQ ID NO: 2030 - RNA, 21 nt, Artificial Sequence
  Synthetic sequence
gcacacgagguucccccugcu

SEQ ID NO: 2031 - RNA, 21 nt, Artificial Sequence
  Synthetic sequence
gcagcacacgagguucccccu

SEQ ID NO: 2032 - RNA, 21 nt, Artificial Sequence
  Synthetic sequence
gcagggggaaccucgugugcu

SEQ ID NO: 2033 - RNA, 21 nt, Artificial Sequence
  Synthetic sequence
ggugaagagaaaagcaggggg

SEQ ID NO: 2034 - RNA, 21 nt, Artificial Sequence
  Synthetic sequence
gguucccccugcuuuucucuu

SEQ ID NO: 2035 - RNA, 21 nt, Artificial Sequence
  Synthetic sequence
gugaagagaaaagcaggggga

SEQ ID NO: 2036 - RNA, 21 nt, Artificial Sequence
  Synthetic sequence
guucccccugcuuuucucuuc

SEQ ID NO: 2037 - RNA, 21 nt, Artificial Sequence
  Synthetic sequence
uccauggugaagagaaaagca

SEQ ID NO: 2038 - RNA, 21 nt, Artificial Sequence
  Synthetic sequence
ucccccugcuuuucucuucac

SEQ ID NO: 2039 - RNA, 21 nt, Artificial Sequence
  Synthetic sequence
ugaagagaaaagcagggggaa

SEQ ID NO: 2040 - RNA, 21 nt, Artificial Sequence
  Synthetic sequence
uggugaagagaaaagcagggg

SEQ ID NO: 2041 - RNA, 21 nt, Artificial Sequence
  Synthetic sequence
uucccccugcuuuucucuuca

SEQ ID NO: 2042 - RNA, 22 nt, Artificial Sequence
  Synthetic sequence
aaaagcagggggaaccucgugu

SEQ ID NO: 2043 - RNA, 22 nt, Artificial Sequence
  Synthetic sequence
aaagcagggggaaccucgugug

SEQ ID NO: 2044 - RNA, 22 nt, Artificial Sequence
  Synthetic sequence
aagagaaaagcagggggaaccu

SEQ ID NO: 2045 - RNA, 22 nt, Artificial Sequence
  Synthetic sequence
aagcagggggaaccucgugugc

SEQ ID NO: 2046 - RNA, 22 nt, Artificial Sequence
  Synthetic sequence
acacgagguucccccugcuuuu

SEQ ID NO: 2047 - RNA, 22 nt, Artificial Sequence
  Synthetic sequence
acgagguucccccugcuuuucu

SEQ ID NO: 2048 - RNA, 22 nt, Artificial Sequence
  Synthetic sequence
agaaaagcagggggaaccucgu

SEQ ID NO: 2049 - RNA, 22 nt, Artificial Sequence
  Synthetic sequence
agagaaaagcagggggaaccuc

SEQ ID NO: 2050 - RNA, 22 nt, Artificial Sequence
  Synthetic sequence
agcacacgagguucccccugcu

SEQ ID NO: 2051 - RNA, 22 nt, Artificial Sequence
  Synthetic sequence
agcagcacacgagguucccccu

SEQ ID NO: 2052 - RNA, 22 nt, Artificial Sequence
  Synthetic sequence
agcagggggaaccucgugugcu

SEQ ID NO: 2053 - RNA, 22 nt, Artificial Sequence
  Synthetic sequence
agguucccccugcuuuucucuu

SEQ ID NO: 2054 - RNA, 22 nt, Artificial Sequence
  Synthetic sequence
auccauggugaagagaaaagca

SEQ ID NO: 2055 - RNA, 22 nt, Artificial Sequence
  Synthetic sequence
auggugaagagaaaagcagggg

SEQ ID NO: 2056 - RNA, 22 nt, Artificial Sequence
  Synthetic sequence
cacacgagguucccccugcuuu

SEQ ID NO: 2057 - RNA, 22 nt, Artificial Sequence
  Synthetic sequence
cacgagguucccccugcuuuuc

SEQ ID NO: 2058 - RNA, 22 nt, Artificial Sequence
  Synthetic sequence
cagcacacgagguucccccugc

SEQ ID NO: 2059 - RNA, 22 nt, Artificial Sequence
  Synthetic sequence
cagggggaaccucgugugcugc

SEQ ID NO: 2060 - RNA, 22 nt, Artificial Sequence
  Synthetic sequence
cauggugaagagaaaagcaggg

SEQ ID NO: 2061 - RNA, 22 nt, Artificial Sequence
  Synthetic sequence
ccauggugaagagaaaagcagg

SEQ ID NO: 2062 - RNA, 22 nt, Artificial Sequence
  Synthetic sequence
cccccugcuuuucucuucacca

SEQ ID NO: 2063 - RNA, 22 nt, Artificial Sequence
  Synthetic sequence
ccccugcuuuucucuucaccau

SEQ ID NO: 2064 - RNA, 22 nt, Artificial Sequence
  Synthetic sequence
cccugcuuuucucuucaccaug

SEQ ID NO: 2065 - RNA, 22 nt, Artificial Sequence
  Synthetic sequence
ccugcuuuucucuucaccaugg

SEQ ID NO: 2066 - RNA, 22 nt, Artificial Sequence
  Synthetic sequence
cgagguucccccugcuuuucuc

SEQ ID NO: 2067 - RNA, 22 nt, Artificial Sequence
  Synthetic sequence
cugcuuuucucuucaccaugga

SEQ ID NO: 2068 - RNA, 22 nt, Artificial Sequence
  Synthetic sequence
gaaaagcagggggaaccucgug

SEQ ID NO: 2069 - RNA, 22 nt, Artificial Sequence
  Synthetic sequence
gaagagaaaagcagggggaacc

SEQ ID NO: 2070 - RNA, 22 nt, Artificial Sequence
  Synthetic sequence
gagaaaagcagggggaaccucg

SEQ ID NO: 2071 - RNA, 22 nt, Artificial Sequence
  Synthetic sequence
gagguucccccugcuuuucucu

SEQ ID NO: 2072 - RNA, 22 nt, Artificial Sequence
  Synthetic sequence
gcacacgagguucccccugcuu

SEQ ID NO: 2073 - RNA, 22 nt, Artificial Sequence
  Synthetic sequence
gcagcacacgagguucccccug

SEQ ID NO: 2074 - RNA, 22 nt, Artificial Sequence
  Synthetic sequence
gcagggggaaccucgugugcug

SEQ ID NO: 2075 - RNA, 22 nt, Artificial Sequence
  Synthetic sequence
ggugaagagaaaagcaggggga

SEQ ID NO: 2076 - RNA, 22 nt, Artificial Sequence
  Synthetic sequence
gguucccccugcuuuucucuuc

SEQ ID NO: 2077 - RNA, 22 nt, Artificial Sequence
  Synthetic sequence
gugaagagaaaagcagggggaa

SEQ ID NO: 2078 - RNA, 22 nt, Artificial Sequence
  Synthetic sequence
guucccccugcuuuucucuuca

SEQ ID NO: 2079 - RNA, 22 nt, Artificial Sequence
  Synthetic sequence
uccauggugaagagaaaagcag

SEQ ID NO: 2080 - RNA, 22 nt, Artificial Sequence
  Synthetic sequence
ucccccugcuuuucucuucacc

SEQ ID NO: 2081 - RNA, 22 nt, Artificial Sequence
  Synthetic sequence
ugaagagaaaagcagggggaac

SEQ ID NO: 2082 - RNA, 22 nt, Artificial Sequence
  Synthetic sequence
uggugaagagaaaagcaggggg

SEQ ID NO: 2083 - RNA, 22 nt, Artificial Sequence
  Synthetic sequence
uucccccugcuuuucucuucac

SEQ ID NO: 2084 - RNA, 21 nt, Artificial Sequence
  Synthetic sequence
aauccauggugcggggaccag

SEQ ID NO: 2085 - RNA, 21 nt, Artificial Sequence
  Synthetic sequence
acguugcauuaauccauggug

SEQ ID NO: 2086 - RNA, 21 nt, Artificial Sequence
  Synthetic sequence
agguauccccauccuucuggu

SEQ ID NO: 2087 - RNA, 21 nt, Artificial Sequence
  Synthetic sequence
auccauggugcggggaccaga

SEQ ID NO: 2088 - RNA, 21 nt, Artificial Sequence
  Synthetic sequence
auccccauccuucuggucccc

SEQ ID NO: 2089 - RNA, 21 nt, Artificial Sequence
  Synthetic sequence
auccuucugguccccgcacca

SEQ ID NO: 2090 - RNA, 21 nt, Artificial Sequence
  Synthetic sequence
auggugcggggaccagaagga

SEQ ID NO: 2091 - RNA, 21 nt, Artificial Sequence
  Synthetic sequence
auuaauccauggugcggggac

SEQ ID NO: 2092 - RNA, 21 nt, Artificial Sequence
  Synthetic sequence
cacguugcauuaauccauggu

SEQ ID NO: 2093 - RNA, 21 nt, Artificial Sequence
  Synthetic sequence
cauccuucugguccccgcacc

SEQ ID NO: 2094 - RNA, 21 nt, Artificial Sequence
  Synthetic sequence
cauggugcggggaccagaagg

SEQ ID NO: 2095 - RNA, 21 nt, Artificial Sequence
  Synthetic sequence
cauuaauccauggugcgggga

SEQ ID NO: 2096 - RNA, 21 nt, Artificial Sequence
  Synthetic sequence
ccauccuucugguccccgcac

SEQ ID NO: 2097 - RNA, 21 nt, Artificial Sequence
  Synthetic sequence
ccauggugcggggaccagaag

SEQ ID NO: 2098 - RNA, 21 nt, Artificial Sequence
  Synthetic sequence
cccauccuucugguccccgca

SEQ ID NO: 2099 - RNA, 21 nt, Artificial Sequence
  Synthetic sequence
ccccauccuucugguccccgc

SEQ ID NO: 2100 - RNA, 21 nt, Artificial Sequence
  Synthetic sequence
ccccgcaccauggauuaaugc

SEQ ID NO: 2101 - RNA, 21 nt, Artificial Sequence
  Synthetic sequence
cccgcaccauggauuaaugca

SEQ ID NO: 2102 - RNA, 21 nt, Artificial Sequence
  Synthetic sequence
ccgcaccauggauuaaugcaa

SEQ ID NO: 2103 - RNA, 21 nt, Artificial Sequence
  Synthetic sequence
ccuucugguccccgcaccaug

SEQ ID NO: 2104 - RNA, 21 nt, Artificial Sequence
  Synthetic sequence
cggggaccagaaggaugggga

SEQ ID NO: 2105 - RNA, 21 nt, Artificial Sequence
  Synthetic sequence
cguugcauuaauccauggugc

SEQ ID NO: 2106 - RNA, 21 nt, Artificial Sequence
  Synthetic sequence
cugguccccgcaccauggauu

SEQ ID NO: 2107 - RNA, 21 nt, Artificial Sequence
  Synthetic sequence
cuucugguccccgcaccaugg

SEQ ID NO: 2108 - RNA, 21 nt, Artificial Sequence
  Synthetic sequence
gcauuaauccauggugcgggg

SEQ ID NO: 2109 - RNA, 21 nt, Artificial Sequence
  Synthetic sequence
gcggggaccagaaggaugggg

SEQ ID NO: 2110 - RNA, 21 nt, Artificial Sequence
  Synthetic sequence
gguauccccauccuucugguc

SEQ ID NO: 2111 - RNA, 21 nt, Artificial Sequence
  Synthetic sequence
gguccccgcaccauggauuaa

SEQ ID NO: 2112 - RNA, 21 nt, Artificial Sequence
  Synthetic sequence
ggugcggggaccagaaggaug

SEQ ID NO: 2113 - RNA, 21 nt, Artificial Sequence
  Synthetic sequence
guauccccauccuucuggucc

SEQ ID NO: 2114 - RNA, 21 nt, Artificial Sequence
  Synthetic sequence
guccccgcaccauggauuaau

SEQ ID NO: 2115 - RNA, 21 nt, Artificial Sequence
  Synthetic sequence
gugcggggaccagaaggaugg

SEQ ID NO: 2116 - RNA, 21 nt, Artificial Sequence
  Synthetic sequence
guugcauuaauccauggugcg

SEQ ID NO: 2117 - RNA, 21 nt, Artificial Sequence
  Synthetic sequence
uaauccauggugcggggacca

SEQ ID NO: 2118 - RNA, 21 nt, Artificial Sequence
  Synthetic sequence
uauccccauccuucugguccc

SEQ ID NO: 2119 - RNA, 21 nt, Artificial Sequence
  Synthetic sequence
ucacguugcauuaauccaugg

SEQ ID NO: 2120 - RNA, 21 nt, Artificial Sequence
  Synthetic sequence
uccauggugcggggaccagaa

SEQ ID NO: 2121 - RNA, 21 nt, Artificial Sequence
  Synthetic sequence
uccccauccuucugguccccg

SEQ ID NO: 2122 - RNA, 21 nt, Artificial Sequence
  Synthetic sequence
uccccgcaccauggauuaaug

SEQ ID NO: 2123 - RNA, 21 nt, Artificial Sequence
  Synthetic sequence
uccuucugguccccgcaccau

SEQ ID NO: 2124 - RNA, 21 nt, Artificial Sequence
  Synthetic sequence
ucugguccccgcaccauggau

SEQ ID NO: 2125 - RNA, 21 nt, Artificial Sequence
  Synthetic sequence
ugcauuaauccauggugcggg

SEQ ID NO: 2126 - RNA, 21 nt, Artificial Sequence
  Synthetic sequence
ugcggggaccagaaggauggg

SEQ ID NO: 2127 - RNA, 21 nt, Artificial Sequence
  Synthetic sequence
ugguccccgcaccauggauua

SEQ ID NO: 2128 - RNA, 21 nt, Artificial Sequence
  Synthetic sequence
uggugcggggaccagaaggau

SEQ ID NO: 2129 - RNA, 21 nt, Artificial Sequence
  Synthetic sequence
uuaauccauggugcggggacc

SEQ ID NO: 2130 - RNA, 21 nt, Artificial Sequence
  Synthetic sequence
uucugguccccgcaccaugga

SEQ ID NO: 2131 - RNA, 21 nt, Artificial Sequence
  Synthetic sequence
uugcauuaauccauggugcgg

SEQ ID NO: 2132 - RNA, 22 nt, Artificial Sequence
  Synthetic sequence
aagguauccccauccuucuggu

SEQ ID NO: 2133 - RNA, 22 nt, Artificial Sequence
  Synthetic sequence
aauccauggugcggggaccaga

SEQ ID NO: 2134 - RNA, 22 nt, Artificial Sequence
  Synthetic sequence
acguugcauuaauccauggugc

SEQ ID NO: 2135 - RNA, 22 nt, Artificial Sequence
  Synthetic sequence
agguauccccauccuucugguc

SEQ ID NO: 2136 - RNA, 22 nt, Artificial Sequence
  Synthetic sequence
auccauggugcggggaccagaa

SEQ ID NO: 2137 - RNA, 22 nt, Artificial Sequence
  Synthetic sequence
auccccauccuucugguccccg

SEQ ID NO: 2138 - RNA, 22 nt, Artificial Sequence
  Synthetic sequence
auccuucugguccccgcaccau

SEQ ID NO: 2139 - RNA, 22 nt, Artificial Sequence
  Synthetic sequence
auggugcggggaccagaaggau

SEQ ID NO: 2140 - RNA, 22 nt, Artificial Sequence
  Synthetic sequence
auuaauccauggugcggggacc

SEQ ID NO: 2141 - RNA, 22 nt, Artificial Sequence
  Synthetic sequence
cacguugcauuaauccauggug

SEQ ID NO: 2142 - RNA, 22 nt, Artificial Sequence
  Synthetic sequence
cauccuucugguccccgcacca

SEQ ID NO: 2143 - RNA, 22 nt, Artificial Sequence
  Synthetic sequence
cauggugcggggaccagaagga

SEQ ID NO: 2144 - RNA, 22 nt, Artificial Sequence
  Synthetic sequence
cauuaauccauggugcggggac

SEQ ID NO: 2145 - RNA, 22 nt, Artificial Sequence
  Synthetic sequence
ccauccuucugguccccgcacc

SEQ ID NO: 2146 - RNA, 22 nt, Artificial Sequence
  Synthetic sequence
ccauggugcggggaccagaagg

SEQ ID NO: 2147 - RNA, 22 nt, Artificial Sequence
  Synthetic sequence
cccauccuucugguccccgcac

SEQ ID NO: 2148 - RNA, 22 nt, Artificial Sequence
  Synthetic sequence
ccccauccuucugguccccgca

SEQ ID NO: 2149 - RNA, 22 nt, Artificial Sequence
  Synthetic sequence
ccccgcaccauggauuaaugca

SEQ ID NO: 2150 - RNA, 22 nt, Artificial Sequence
  Synthetic sequence
cccgcaccauggauuaaugcaa

SEQ ID NO: 2151 - RNA, 22 nt, Artificial Sequence
  Synthetic sequence
ccgcaccauggauuaaugcaac

SEQ ID NO: 2152 - RNA, 22 nt, Artificial Sequence
  Synthetic sequence
ccuucugguccccgcaccaugg

SEQ ID NO: 2153 - RNA, 22 nt, Artificial Sequence
  Synthetic sequence
cggggaccagaaggauggggau

SEQ ID NO: 2154 - RNA, 22 nt, Artificial Sequence
  Synthetic sequence
cguugcauuaauccauggugcg

SEQ ID NO: 2155 - RNA, 22 nt, Artificial Sequence
  Synthetic sequence
cugguccccgcaccauggauua

SEQ ID NO: 2156 - RNA, 22 nt, Artificial Sequence
  Synthetic sequence
cuucugguccccgcaccaugga

SEQ ID NO: 2157 - RNA, 22 nt, Artificial Sequence
  Synthetic sequence
gcauuaauccauggugcgggga

SEQ ID NO: 2158 - RNA, 22 nt, Artificial Sequence
  Synthetic sequence
gcggggaccagaaggaugggga

SEQ ID NO: 2159 - RNA, 22 nt, Artificial Sequence
  Synthetic sequence
gguauccccauccuucuggucc

SEQ ID NO: 2160 - RNA, 22 nt, Artificial Sequence
  Synthetic sequence
gguccccgcaccauggauuaau

SEQ ID NO: 2161 - RNA, 22 nt, Artificial Sequence
  Synthetic sequence
ggugcggggaccagaaggaugg

SEQ ID NO: 2162 - RNA, 22 nt, Artificial Sequence
  Synthetic sequence
guauccccauccuucugguccc

SEQ ID NO: 2163 - RNA, 22 nt, Artificial Sequence
  Synthetic sequence
guccccgcaccauggauuaaug

SEQ ID NO: 2164 - RNA, 22 nt, Artificial Sequence
  Synthetic sequence
gugcggggaccagaaggauggg

SEQ ID NO: 2165 - RNA, 22 nt, Artificial Sequence
  Synthetic sequence
guugcauuaauccauggugcgg

SEQ ID NO: 2166 - RNA, 22 nt, Artificial Sequence
  Synthetic sequence
uaauccauggugcggggaccag

SEQ ID NO: 2167 - RNA, 22 nt, Artificial Sequence
  Synthetic sequence
uauccccauccuucuggucccc

SEQ ID NO: 2168 - RNA, 22 nt, Artificial Sequence
  Synthetic sequence
ucacguugcauuaauccauggu

SEQ ID NO: 2169 - RNA, 22 nt, Artificial Sequence
  Synthetic sequence
uccauggugcggggaccagaag

SEQ ID NO: 2170 - RNA, 22 nt, Artificial Sequence
  Synthetic sequence
uccccauccuucugguccccgc

SEQ ID NO: 2171 - RNA, 22 nt, Artificial Sequence
  Synthetic sequence
uccccgcaccauggauuaaugc

SEQ ID NO: 2172 - RNA, 22 nt, Artificial Sequence
  Synthetic sequence
uccuucugguccccgcaccaug

SEQ ID NO: 2173 - RNA, 22 nt, Artificial Sequence
  Synthetic sequence
ucugguccccgcaccauggauu

SEQ ID NO: 2174 - RNA, 22 nt, Artificial Sequence
  Synthetic sequence
ugcauuaauccauggugcgggg

SEQ ID NO: 2175 - RNA, 22 nt, Artificial Sequence
  Synthetic sequence
ugcggggaccagaaggaugggg

SEQ ID NO: 2176 - RNA, 22 nt, Artificial Sequence
  Synthetic sequence
ugguccccgcaccauggauuaa

SEQ ID NO: 2177 - RNA, 22 nt, Artificial Sequence
  Synthetic sequence
uggugcggggaccagaaggaug

SEQ ID NO: 2178 - RNA, 22 nt, Artificial Sequence
  Synthetic sequence
uuaauccauggugcggggacca

SEQ ID NO: 2179 - RNA, 22 nt, Artificial Sequence
  Synthetic sequence
uucacguugcauuaauccaugg

SEQ ID NO: 2180 - RNA, 22 nt, Artificial Sequence
  Synthetic sequence
uucugguccccgcaccauggau

SEQ ID NO: 2181 - RNA, 22 nt, Artificial Sequence
  Synthetic sequence
uugcauuaauccauggugcggg

SEQ ID NO: 2182 - RNA, 21 nt, Artificial Sequence
  Synthetic sequence
aauccauggugcagggaccag

SEQ ID NO: 2183 - RNA, 21 nt, Artificial Sequence
  Synthetic sequence
auccauggugcagggaccaga

SEQ ID NO: 2184 - RNA, 21 nt, Artificial Sequence
  Synthetic sequence
auccccauccuucuggucccu

SEQ ID NO: 2185 - RNA, 21 nt, Artificial Sequence
  Synthetic sequence
auccuucuggucccugcacca

SEQ ID NO: 2186 - RNA, 21 nt, Artificial Sequence
  Synthetic sequence
auggugcagggaccagaagga

SEQ ID NO: 2187 - RNA, 21 nt, Artificial Sequence
  Synthetic sequence
auuaauccauggugcagggac

SEQ ID NO: 2188 - RNA, 21 nt, Artificial Sequence
  Synthetic sequence
cagggaccagaaggaugggga

SEQ ID NO: 2189 - RNA, 21 nt, Artificial Sequence
  Synthetic sequence
cauccuucuggucccugcacc

SEQ ID NO: 2190 - RNA, 21 nt, Artificial Sequence
  Synthetic sequence
cauggugcagggaccagaagg

SEQ ID NO: 2191 - RNA, 21 nt, Artificial Sequence
  Synthetic sequence
cauuaauccauggugcaggga

SEQ ID NO: 2192 - RNA, 21 nt, Artificial Sequence
  Synthetic sequence
ccauccuucuggucccugcac

SEQ ID NO: 2193 - RNA, 21 nt, Artificial Sequence
  Synthetic sequence
ccauggugcagggaccagaag

SEQ ID NO: 2194 - RNA, 21 nt, Artificial Sequence
  Synthetic sequence
cccauccuucuggucccugca

SEQ ID NO: 2195 - RNA, 21 nt, Artificial Sequence
  Synthetic sequence
ccccauccuucuggucccugc

SEQ ID NO: 2196 - RNA, 21 nt, Artificial Sequence
  Synthetic sequence
cccugcaccauggauuaaugc

SEQ ID NO: 2197 - RNA, 21 nt, Artificial Sequence
  Synthetic sequence
ccugcaccauggauuaaugca

SEQ ID NO: 2198 - RNA, 21 nt, Artificial Sequence
  Synthetic sequence
ccuucuggucccugcaccaug

SEQ ID NO: 2199 - RNA, 21 nt, Artificial Sequence
  Synthetic sequence
cugcaccauggauuaaugcaa

SEQ ID NO: 2200 - RNA, 21 nt, Artificial Sequence
  Synthetic sequence
cuggucccugcaccauggauu

SEQ ID NO: 2201 - RNA, 21 nt, Artificial Sequence
  Synthetic sequence
cuucuggucccugcaccaugg

SEQ ID NO: 2202 - RNA, 21 nt, Artificial Sequence
  Synthetic sequence
gcagggaccagaaggaugggg

SEQ ID NO: 2203 - RNA, 21 nt, Artificial Sequence
  Synthetic sequence
gcauuaauccauggugcaggg

SEQ ID NO: 2204 - RNA, 21 nt, Artificial Sequence
  Synthetic sequence
ggucccugcaccauggauuaa

SEQ ID NO: 2205 - RNA, 21 nt, Artificial Sequence
  Synthetic sequence
ggugcagggaccagaaggaug

SEQ ID NO: 2206 - RNA, 21 nt, Artificial Sequence
  Synthetic sequence
gucccugcaccauggauuaau

SEQ ID NO: 2207 - RNA, 21 nt, Artificial Sequence
  Synthetic sequence
gugcagggaccagaaggaugg

SEQ ID NO: 2208 - RNA, 21 nt, Artificial Sequence
  Synthetic sequence
guugcauuaauccauggugca

SEQ ID NO: 2209 - RNA, 21 nt, Artificial Sequence
  Synthetic sequence
uaauccauggugcagggacca

SEQ ID NO: 2210 - RNA, 21 nt, Artificial Sequence
  Synthetic sequence
uccauggugcagggaccagaa

SEQ ID NO: 2211 - RNA, 21 nt, Artificial Sequence
  Synthetic sequence
uccccauccuucuggucccug

SEQ ID NO: 2212 - RNA, 21 nt, Artificial Sequence
  Synthetic sequence
ucccugcaccauggauuaaug

SEQ ID NO: 2213 - RNA, 21 nt, Artificial Sequence
  Synthetic sequence
uccuucuggucccugcaccau

SEQ ID NO: 2214 - RNA, 21 nt, Artificial Sequence
  Synthetic sequence
ucuggucccugcaccauggau

SEQ ID NO: 2215 - RNA, 21 nt, Artificial Sequence
  Synthetic sequence
ugcagggaccagaaggauggg

SEQ ID NO: 2216 - RNA, 21 nt, Artificial Sequence
  Synthetic sequence
ugcauuaauccauggugcagg

SEQ ID NO: 2217 - RNA, 21 nt, Artificial Sequence
  Synthetic sequence
uggucccugcaccauggauua

SEQ ID NO: 2218 - RNA, 21 nt, Artificial Sequence
  Synthetic sequence
uggugcagggaccagaaggau

SEQ ID NO: 2219 - RNA, 21 nt, Artificial Sequence
  Synthetic sequence
uuaauccauggugcagggacc

SEQ ID NO: 2220 - RNA, 21 nt, Artificial Sequence
  Synthetic sequence
uucuggucccugcaccaugga

SEQ ID NO: 2221 - RNA, 21 nt, Artificial Sequence
  Synthetic sequence
uugcauuaauccauggugcag

SEQ ID NO: 2222 - RNA, 22 nt, Artificial Sequence
  Synthetic sequence
aauccauggugcagggaccaga

SEQ ID NO: 2223 - RNA, 22 nt, Artificial Sequence
  Synthetic sequence
auccauggugcagggaccagaa

SEQ ID NO: 2224 - RNA, 22 nt, Artificial Sequence
  Synthetic sequence
auccccauccuucuggucccug

SEQ ID NO: 2225 - RNA, 22 nt, Artificial Sequence
  Synthetic sequence
auccuucuggucccugcaccau

SEQ ID NO: 2226 - RNA, 22 nt, Artificial Sequence
  Synthetic sequence
auggugcagggaccagaaggau

SEQ ID NO: 2227 - RNA, 22 nt, Artificial Sequence
  Synthetic sequence
auuaauccauggugcagggacc

SEQ ID NO: 2228 - RNA, 22 nt, Artificial Sequence
  Synthetic sequence
cagggaccagaaggauggggau

SEQ ID NO: 2229 - RNA, 22 nt, Artificial Sequence
  Synthetic sequence
cauccuucuggucccugcacca

SEQ ID NO: 2230 - RNA, 22 nt, Artificial Sequence
  Synthetic sequence
cauggugcagggaccagaagga

SEQ ID NO: 2231 - RNA, 22 nt, Artificial Sequence
  Synthetic sequence
cauuaauccauggugcagggac

SEQ ID NO: 2232 - RNA, 22 nt, Artificial Sequence
  Synthetic sequence
ccauccuucuggucccugcacc

SEQ ID NO: 2233 - RNA, 22 nt, Artificial Sequence
  Synthetic sequence
ccauggugcagggaccagaagg

SEQ ID NO: 2234 - RNA, 22 nt, Artificial Sequence
  Synthetic sequence
cccauccuucuggucccugcac

SEQ ID NO: 2235 - RNA, 22 nt, Artificial Sequence
  Synthetic sequence
ccccauccuucuggucccugca

SEQ ID NO: 2236 - RNA, 22 nt, Artificial Sequence
  Synthetic sequence
cccugcaccauggauuaaugca

SEQ ID NO: 2237 - RNA, 22 nt, Artificial Sequence
  Synthetic sequence
ccugcaccauggauuaaugcaa

SEQ ID NO: 2238 - RNA, 22 nt, Artificial Sequence
  Synthetic sequence
ccuucuggucccugcaccaugg

SEQ ID NO: 2239 - RNA, 22 nt, Artificial Sequence
  Synthetic sequence
cguugcauuaauccauggugca

SEQ ID NO: 2240 - RNA, 22 nt, Artificial Sequence
  Synthetic sequence
cugcaccauggauuaaugcaac

SEQ ID NO: 2241 - RNA, 22 nt, Artificial Sequence
  Synthetic sequence
cuggucccugcaccauggauua

SEQ ID NO: 2242 - RNA, 22 nt, Artificial Sequence
  Synthetic sequence
cuucuggucccugcaccaugga

SEQ ID NO: 2243 - RNA, 22 nt, Artificial Sequence
  Synthetic sequence
gcagggaccagaaggaugggga

SEQ ID NO: 2244 - RNA, 22 nt, Artificial Sequence
  Synthetic sequence
gcauuaauccauggugcaggga

SEQ ID NO: 2245 - RNA, 22 nt, Artificial Sequence
  Synthetic sequence
ggucccugcaccauggauuaau

SEQ ID NO: 2246 - RNA, 22 nt, Artificial Sequence
  Synthetic sequence
ggugcagggaccagaaggaugg

SEQ ID NO: 2247 - RNA, 22 nt, Artificial Sequence
  Synthetic sequence
gucccugcaccauggauuaaug

SEQ ID NO: 2248 - RNA, 22 nt, Artificial Sequence
  Synthetic sequence
gugcagggaccagaaggauggg

SEQ ID NO: 2249 - RNA, 22 nt, Artificial Sequence
  Synthetic sequence
guugcauuaauccauggugcag

SEQ ID NO: 2250 - RNA, 22 nt, Artificial Sequence
  Synthetic sequence
uaauccauggugcagggaccag

SEQ ID NO: 2251 - RNA, 22 nt, Artificial Sequence
  Synthetic sequence
uauccccauccuucuggucccu

SEQ ID NO: 2252 - RNA, 22 nt, Artificial Sequence
  Synthetic sequence
uccauggugcagggaccagaag

SEQ ID NO: 2253 - RNA, 22 nt, Artificial Sequence
  Synthetic sequence
uccccauccuucuggucccugc

SEQ ID NO: 2254 - RNA, 22 nt, Artificial Sequence
  Synthetic sequence
ucccugcaccauggauuaaugc

SEQ ID NO: 2255 - RNA, 22 nt, Artificial Sequence
  Synthetic sequence
uccuucuggucccugcaccaug

SEQ ID NO: 2256 - RNA, 22 nt, Artificial Sequence
  Synthetic sequence
ucuggucccugcaccauggauu

SEQ ID NO: 2257 - RNA, 22 nt, Artificial Sequence
  Synthetic sequence
ugcagggaccagaaggaugggg

SEQ ID NO: 2258 - RNA, 22 nt, Artificial Sequence
  Synthetic sequence
ugcauuaauccauggugcaggg

SEQ ID NO: 2259 - RNA, 22 nt, Artificial Sequence
  Synthetic sequence
uggucccugcaccauggauuaa

SEQ ID NO: 2260 - RNA, 22 nt, Artificial Sequence
  Synthetic sequence
uggugcagggaccagaaggaug

SEQ ID NO: 2261 - RNA, 22 nt, Artificial Sequence
  Synthetic sequence
uuaauccauggugcagggacca

SEQ ID NO: 2262 - RNA, 22 nt, Artificial Sequence
  Synthetic sequence
uucuggucccugcaccauggau

SEQ ID NO: 2263 - RNA, 22 nt, Artificial Sequence
  Synthetic sequence
uugcauuaauccauggugcagg

SEQ ID NO: 2264 - RNA, 21 nt, Artificial Sequence
  Synthetic sequence
aaaguucagggauguccgccu

SEQ ID NO: 2265 - RNA, 21 nt, Artificial Sequence
  Synthetic sequence
aagccacaccugaaggcggac

SEQ ID NO: 2266 - RNA, 21 nt, Artificial Sequence
  Synthetic sequence
aaggcggacaucccugaacuu

SEQ ID NO: 2267 - RNA, 21 nt, Artificial Sequence
  Synthetic sequence
aaguucagggauguccgccuu

SEQ ID NO: 2268 - RNA, 21 nt, Artificial Sequence
  Synthetic sequence
acaccugaaggcggacauccc

SEQ ID NO: 2269 - RNA, 21 nt, Artificial Sequence
  Synthetic sequence
accugaaggcggacaucccug

SEQ ID NO: 2270 - RNA, 21 nt, Artificial Sequence
  Synthetic sequence
agccacaccugaaggcggaca

SEQ ID NO: 2271 - RNA, 21 nt, Artificial Sequence
  Synthetic sequence
aggcggacaucccugaacuuu

SEQ ID NO: 2272 - RNA, 21 nt, Artificial Sequence
  Synthetic sequence
agggauguccgccuucaggug

SEQ ID NO: 2273 - RNA, 21 nt, Artificial Sequence
  Synthetic sequence
aguucagggauguccgccuuc

SEQ ID NO: 2274 - RNA, 21 nt, Artificial Sequence
  Synthetic sequence
aucaagccacaccugaaggcg

SEQ ID NO: 2275 - RNA, 21 nt, Artificial Sequence
  Synthetic sequence
auggaaaguucagggaugucc

SEQ ID NO: 2276 - RNA, 21 nt, Artificial Sequence
  Synthetic sequence
auguccgccuucagguguggc

SEQ ID NO: 2277 - RNA, 21 nt, Artificial Sequence
  Synthetic sequence
caagccacaccugaaggcgga

SEQ ID NO: 2278 - RNA, 21 nt, Artificial Sequence
  Synthetic sequence
cacaccugaaggcggacaucc

SEQ ID NO: 2279 - RNA, 21 nt, Artificial Sequence
  Synthetic sequence
caccugaaggcggacaucccu

SEQ ID NO: 2280 - RNA, 21 nt, Artificial Sequence
  Synthetic sequence
cagggauguccgccuucaggu

SEQ ID NO: 2281 - RNA, 21 nt, Artificial Sequence
  Synthetic sequence
ccacaccugaaggcggacauc

SEQ ID NO: 2282 - RNA, 21 nt, Artificial Sequence
  Synthetic sequence
ccugaaggcggacaucccuga

SEQ ID NO: 2283 - RNA, 21 nt, Artificial Sequence
  Synthetic sequence
cggacaucccugaacuuucca

SEQ ID NO: 2284 - RNA, 21 nt, Artificial Sequence
  Synthetic sequence
cugaaggcggacaucccugaa

SEQ ID NO: 2285 - RNA, 21 nt, Artificial Sequence
  Synthetic sequence
gaaaguucagggauguccgcc

SEQ ID NO: 2286 - RNA, 21 nt, Artificial Sequence
  Synthetic sequence
gaaggcggacaucccugaacu

SEQ ID NO: 2287 - RNA, 21 nt, Artificial Sequence
  Synthetic sequence
gaucaagccacaccugaaggc

SEQ ID NO: 2288 - RNA, 21 nt, Artificial Sequence
  Synthetic sequence
gauguccgccuucaggugugg

SEQ ID NO: 2289 - RNA, 21 nt, Artificial Sequence
  Synthetic sequence
gccacaccugaaggcggacau

SEQ ID NO: 2290 - RNA, 21 nt, Artificial Sequence
  Synthetic sequence
gcggacaucccugaacuuucc

SEQ ID NO: 2291 - RNA, 21 nt, Artificial Sequence
  Synthetic sequence
ggaaaguucagggauguccgc

SEQ ID NO: 2292 - RNA, 21 nt, Artificial Sequence
  Synthetic sequence
ggacaucccugaacuuuccau

SEQ ID NO: 2293 - RNA, 21 nt, Artificial Sequence
  Synthetic sequence
ggaucaagccacaccugaagg

SEQ ID NO: 2294 - RNA, 21 nt, Artificial Sequence
  Synthetic sequence
ggauguccgccuucaggugug

SEQ ID NO: 2295 - RNA, 21 nt, Artificial Sequence
  Synthetic sequence
ggcggacaucccugaacuuuc

SEQ ID NO: 2296 - RNA, 21 nt, Artificial Sequence
  Synthetic sequence
gggauguccgccuucaggugu

SEQ ID NO: 2297 - RNA, 21 nt, Artificial Sequence
  Synthetic sequence
guccgccuucagguguggcuu

SEQ ID NO: 2298 - RNA, 21 nt, Artificial Sequence
  Synthetic sequence
guucagggauguccgccuuca

SEQ ID NO: 2299 - RNA, 21 nt, Artificial Sequence
  Synthetic sequence
uauggaaaguucagggauguc

SEQ ID NO: 2300 - RNA, 21 nt, Artificial Sequence
  Synthetic sequence
ucaagccacaccugaaggcgg

SEQ ID NO: 2301 - RNA, 21 nt, Artificial Sequence
  Synthetic sequence
ucagggauguccgccuucagg

SEQ ID NO: 2302 - RNA, 21 nt, Artificial Sequence
  Synthetic sequence
uccgccuucagguguggcuug

SEQ ID NO: 2303 - RNA, 21 nt, Artificial Sequence
  Synthetic sequence
ugaaggcggacaucccugaac

SEQ ID NO: 2304 - RNA, 21 nt, Artificial Sequence
  Synthetic sequence
uggaaaguucagggauguccg

SEQ ID NO: 2305 - RNA, 21 nt, Artificial Sequence
  Synthetic sequence
uggaucaagccacaccugaag

SEQ ID NO: 2306 - RNA, 21 nt, Artificial Sequence
  Synthetic sequence
uguccgccuucagguguggcu

SEQ ID NO: 2307 - RNA, 21 nt, Artificial Sequence
  Synthetic sequence
uucagggauguccgccuucag

SEQ ID NO: 2308 - RNA, 22 nt, Artificial Sequence
  Synthetic sequence
aaaguucagggauguccgccuu

SEQ ID NO: 2309 - RNA, 22 nt, Artificial Sequence
  Synthetic sequence
aagccacaccugaaggcggaca

SEQ ID NO: 2310 - RNA, 22 nt, Artificial Sequence
  Synthetic sequence
aaggcggacaucccugaacuuu

SEQ ID NO: 2311 - RNA, 22 nt, Artificial Sequence
  Synthetic sequence
aaguucagggauguccgccuuc

SEQ ID NO: 2312 - RNA, 22 nt, Artificial Sequence
  Synthetic sequence
acaccugaaggcggacaucccu

SEQ ID NO: 2313 - RNA, 22 nt, Artificial Sequence
  Synthetic sequence
accugaaggcggacaucccuga

SEQ ID NO: 2314 - RNA, 22 nt, Artificial Sequence
  Synthetic sequence
agccacaccugaaggcggacau

SEQ ID NO: 2315 - RNA, 22 nt, Artificial Sequence
  Synthetic sequence
aggcggacaucccugaacuuuc

SEQ ID NO: 2316 - RNA, 22 nt, Artificial Sequence
  Synthetic sequence
agggauguccgccuucaggugu

SEQ ID NO: 2317 - RNA, 22 nt, Artificial Sequence
  Synthetic sequence
aguucagggauguccgccuuca

SEQ ID NO: 2318 - RNA, 22 nt, Artificial Sequence
  Synthetic sequence
auauggaaaguucagggauguc

SEQ ID NO: 2319 - RNA, 22 nt, Artificial Sequence
  Synthetic sequence
aucaagccacaccugaaggcgg

SEQ ID NO: 2320 - RNA, 22 nt, Artificial Sequence
  Synthetic sequence
auggaaaguucagggauguccg

SEQ ID NO: 2321 - RNA, 22 nt, Artificial Sequence
  Synthetic sequence
auguccgccuucagguguggcu

SEQ ID NO: 2322 - RNA, 22 nt, Artificial Sequence
  Synthetic sequence
caagccacaccugaaggcggac

SEQ ID NO: 2323 - RNA, 22 nt, Artificial Sequence
  Synthetic sequence
cacaccugaaggcggacauccc

SEQ ID NO: 2324 - RNA, 22 nt, Artificial Sequence
  Synthetic sequence
caccugaaggcggacaucccug

SEQ ID NO: 2325 - RNA, 22 nt, Artificial Sequence
  Synthetic sequence
cagggauguccgccuucaggug

SEQ ID NO: 2326 - RNA, 22 nt, Artificial Sequence
  Synthetic sequence
ccacaccugaaggcggacaucc

SEQ ID NO: 2327 - RNA, 22 nt, Artificial Sequence
  Synthetic sequence
ccugaaggcggacaucccugaa

SEQ ID NO: 2328 - RNA, 22 nt, Artificial Sequence
  Synthetic sequence
cggacaucccugaacuuuccau

SEQ ID NO: 2329 - RNA, 22 nt, Artificial Sequence
  Synthetic sequence
cugaaggcggacaucccugaac

SEQ ID NO: 2330 - RNA, 22 nt, Artificial Sequence
  Synthetic sequence
cuggaucaagccacaccugaag

SEQ ID NO: 2331 - RNA, 22 nt, Artificial Sequence
  Synthetic sequence
gaaaguucagggauguccgccu

SEQ ID NO: 2332 - RNA, 22 nt, Artificial Sequence
  Synthetic sequence
gaaggcggacaucccugaacuu

SEQ ID NO: 2333 - RNA, 22 nt, Artificial Sequence
  Synthetic sequence
gaucaagccacaccugaaggcg

SEQ ID NO: 2334 - RNA, 22 nt, Artificial Sequence
  Synthetic sequence
gauguccgccuucagguguggc

SEQ ID NO: 2335 - RNA, 22 nt, Artificial Sequence
  Synthetic sequence
gccacaccugaaggcggacauc

SEQ ID NO: 2336 - RNA, 22 nt, Artificial Sequence
  Synthetic sequence
gcggacaucccugaacuuucca

SEQ ID NO: 2337 - RNA, 22 nt, Artificial Sequence
  Synthetic sequence
ggaaaguucagggauguccgcc

SEQ ID NO: 2338 - RNA, 22 nt, Artificial Sequence
  Synthetic sequence
ggacaucccugaacuuuccaua

SEQ ID NO: 2339 - RNA, 22 nt, Artificial Sequence
  Synthetic sequence
ggaucaagccacaccugaaggc

SEQ ID NO: 2340 - RNA, 22 nt, Artificial Sequence
  Synthetic sequence
ggauguccgccuucaggugugg

SEQ ID NO: 2341 - RNA, 22 nt, Artificial Sequence
  Synthetic sequence
ggcggacaucccugaacuuucc

SEQ ID NO: 2342 - RNA, 22 nt, Artificial Sequence
  Synthetic sequence
gggauguccgccuucaggugug

SEQ ID NO: 2343 - RNA, 22 nt, Artificial Sequence
  Synthetic sequence
guccgccuucagguguggcuug

SEQ ID NO: 2344 - RNA, 22 nt, Artificial Sequence
  Synthetic sequence
guucagggauguccgccuucag

SEQ ID NO: 2345 - RNA, 22 nt, Artificial Sequence
  Synthetic sequence
uauggaaaguucagggaugucc

SEQ ID NO: 2346 - RNA, 22 nt, Artificial Sequence
  Synthetic sequence
ucaagccacaccugaaggcgga

SEQ ID NO: 2347 - RNA, 22 nt, Artificial Sequence
  Synthetic sequence
ucagggauguccgccuucaggu

SEQ ID NO: 2348 - RNA, 22 nt, Artificial Sequence
  Synthetic sequence
uccgccuucagguguggcuuga

SEQ ID NO: 2349 - RNA, 22 nt, Artificial Sequence
  Synthetic sequence
ugaaggcggacaucccugaacu

SEQ ID NO: 2350 - RNA, 22 nt, Artificial Sequence
  Synthetic sequence
uggaaaguucagggauguccgc

SEQ ID NO: 2351 - RNA, 22 nt, Artificial Sequence
  Synthetic sequence
uggaucaagccacaccugaagg

SEQ ID NO: 2352 - RNA, 22 nt, Artificial Sequence
  Synthetic sequence
uguccgccuucagguguggcuu

SEQ ID NO: 2353 - RNA, 22 nt, Artificial Sequence
  Synthetic sequence
uucagggauguccgccuucagg

SEQ ID NO: 2354 - RNA, 21 nt, Artificial Sequence
  Synthetic sequence
aaaguucagggaugccgccuu

SEQ ID NO: 2355 - RNA, 21 nt, Artificial Sequence
  Synthetic sequence
aagccacaccugaaggcggca

SEQ ID NO: 2356 - RNA, 21 nt, Artificial Sequence
  Synthetic sequence
aaggcggcaucccugaacuuu

SEQ ID NO: 2357 - RNA, 21 nt, Artificial Sequence
  Synthetic sequence
aaguucagggaugccgccuuc

SEQ ID NO: 2358 - RNA, 21 nt, Artificial Sequence
  Synthetic sequence
acaccugaaggcggcaucccu

SEQ ID NO: 2359 - RNA, 21 nt, Artificial Sequence
  Synthetic sequence
accugaaggcggcaucccuga

SEQ ID NO: 2360 - RNA, 21 nt, Artificial Sequence
  Synthetic sequence
agccacaccugaaggcggcau

SEQ ID NO: 2361 - RNA, 21 nt, Artificial Sequence
  Synthetic sequence
aggcggcaucccugaacuuuc

SEQ ID NO: 2362 - RNA, 21 nt, Artificial Sequence
  Synthetic sequence
agggaugccgccuucaggugu

SEQ ID NO: 2363 - RNA, 21 nt, Artificial Sequence
  Synthetic sequence
aguucagggaugccgccuuca

SEQ ID NO: 2364 - RNA, 21 nt, Artificial Sequence
  Synthetic sequence
auauggaaaguucagggaugc

SEQ ID NO: 2365 - RNA, 21 nt, Artificial Sequence
  Synthetic sequence
augccgccuucagguguggcu

SEQ ID NO: 2366 - RNA, 21 nt, Artificial Sequence
  Synthetic sequence
auggaaaguucagggaugccg

SEQ ID NO: 2367 - RNA, 21 nt, Artificial Sequence
  Synthetic sequence
caagccacaccugaaggcggc

SEQ ID NO: 2368 - RNA, 21 nt, Artificial Sequence
  Synthetic sequence
cacaccugaaggcggcauccc

SEQ ID NO: 2369 - RNA, 21 nt, Artificial Sequence
  Synthetic sequence
caccugaaggcggcaucccug

SEQ ID NO: 2370 - RNA, 21 nt, Artificial Sequence
  Synthetic sequence
cagggaugccgccuucaggug

SEQ ID NO: 2371 - RNA, 21 nt, Artificial Sequence
  Synthetic sequence
ccacaccugaaggcggcaucc

SEQ ID NO: 2372 - RNA, 21 nt, Artificial Sequence
  Synthetic sequence
ccugaaggcggcaucccugaa

SEQ ID NO: 2373 - RNA, 21 nt, Artificial Sequence
  Synthetic sequence
cggcaucccugaacuuuccau

SEQ ID NO: 2374 - RNA, 21 nt, Artificial Sequence
  Synthetic sequence
cugaaggcggcaucccugaac

SEQ ID NO: 2375 - RNA, 21 nt, Artificial Sequence
  Synthetic sequence
gaaaguucagggaugccgccu

SEQ ID NO: 2376 - RNA, 21 nt, Artificial Sequence
  Synthetic sequence
gaaggcggcaucccugaacuu

SEQ ID NO: 2377 - RNA, 21 nt, Artificial Sequence
  Synthetic sequence
gaugccgccuucagguguggc

SEQ ID NO: 2378 - RNA, 21 nt, Artificial Sequence
  Synthetic sequence
gccacaccugaaggcggcauc

SEQ ID NO: 2379 - RNA, 21 nt, Artificial Sequence
  Synthetic sequence
gccgccuucagguguggcuug

SEQ ID NO: 2380 - RNA, 21 nt, Artificial Sequence
  Synthetic sequence
gcggcaucccugaacuuucca

SEQ ID NO: 2381 - RNA, 21 nt, Artificial Sequence
  Synthetic sequence
ggaaaguucagggaugccgcc

SEQ ID NO: 2382 - RNA, 21 nt, Artificial Sequence
  Synthetic sequence
ggaugccgccuucaggugugg

SEQ ID NO: 2383 - RNA, 21 nt, Artificial Sequence
  Synthetic sequence
ggcaucccugaacuuuccaua

SEQ ID NO: 2384 - RNA, 21 nt, Artificial Sequence
  Synthetic sequence
ggcggcaucccugaacuuucc

SEQ ID NO: 2385 - RNA, 21 nt, Artificial Sequence
  Synthetic sequence
gggaugccgccuucaggugug

SEQ ID NO: 2386 - RNA, 21 nt, Artificial Sequence
  Synthetic sequence
guucagggaugccgccuucag

SEQ ID NO: 2387 - RNA, 21 nt, Artificial Sequence
  Synthetic sequence
uauggaaaguucagggaugcc

SEQ ID NO: 2388 - RNA, 21 nt, Artificial Sequence
  Synthetic sequence
ucagggaugccgccuucaggu

SEQ ID NO: 2389 - RNA, 21 nt, Artificial Sequence
  Synthetic sequence
ugaaggcggcaucccugaacu

SEQ ID NO: 2390 - RNA, 21 nt, Artificial Sequence
  Synthetic sequence
ugccgccuucagguguggcuu

SEQ ID NO: 2391 - RNA, 21 nt, Artificial Sequence
  Synthetic sequence
uggaaaguucagggaugccgc

SEQ ID NO: 2392 - RNA, 21 nt, Artificial Sequence
  Synthetic sequence
uucagggaugccgccuucagg

SEQ ID NO: 2393 - RNA, 22 nt, Artificial Sequence
  Synthetic sequence
aaaguucagggaugccgccuuc

SEQ ID NO: 2394 - RNA, 22 nt, Artificial Sequence
  Synthetic sequence
aagccacaccugaaggcggcau

SEQ ID NO: 2395 - RNA, 22 nt, Artificial Sequence
  Synthetic sequence
aaggcggcaucccugaacuuuc

SEQ ID NO: 2396 - RNA, 22 nt, Artificial Sequence
  Synthetic sequence
aaguucagggaugccgccuuca

SEQ ID NO: 2397 - RNA, 22 nt, Artificial Sequence
  Synthetic sequence
acaccugaaggcggcaucccug

SEQ ID NO: 2398 - RNA, 22 nt, Artificial Sequence
  Synthetic sequence
accugaaggcggcaucccugaa

SEQ ID NO: 2399 - RNA, 22 nt, Artificial Sequence
  Synthetic sequence
agccacaccugaaggcggcauc

SEQ ID NO: 2400 - RNA, 22 nt, Artificial Sequence
  Synthetic sequence
aggcggcaucccugaacuuucc

SEQ ID NO: 2401 - RNA, 22 nt, Artificial Sequence
  Synthetic sequence
agggaugccgccuucaggugug

SEQ ID NO: 2402 - RNA, 22 nt, Artificial Sequence
  Synthetic sequence
aguucagggaugccgccuucag

SEQ ID NO: 2403 - RNA, 22 nt, Artificial Sequence
  Synthetic sequence
auauggaaaguucagggaugcc

SEQ ID NO: 2404 - RNA, 22 nt, Artificial Sequence
  Synthetic sequence
augccgccuucagguguggcuu

SEQ ID NO: 2405 - RNA, 22 nt, Artificial Sequence
  Synthetic sequence
auggaaaguucagggaugccgc

SEQ ID NO: 2406 - RNA, 22 nt, Artificial Sequence
  Synthetic sequence
caagccacaccugaaggcggca

SEQ ID NO: 2407 - RNA, 22 nt, Artificial Sequence
  Synthetic sequence
cacaccugaaggcggcaucccu

SEQ ID NO: 2408 - RNA, 22 nt, Artificial Sequence
  Synthetic sequence
caccugaaggcggcaucccuga

SEQ ID NO: 2409 - RNA, 22 nt, Artificial Sequence
  Synthetic sequence
cagggaugccgccuucaggugu

SEQ ID NO: 2410 - RNA, 22 nt, Artificial Sequence
  Synthetic sequence
ccacaccugaaggcggcauccc

SEQ ID NO: 2411 - RNA, 22 nt, Artificial Sequence
  Synthetic sequence
ccugaaggcggcaucccugaac

SEQ ID NO: 2412 - RNA, 22 nt, Artificial Sequence
  Synthetic sequence
cggcaucccugaacuuuccaua

SEQ ID NO: 2413 - RNA, 22 nt, Artificial Sequence
  Synthetic sequence
cugaaggcggcaucccugaacu

SEQ ID NO: 2414 - RNA, 22 nt, Artificial Sequence
  Synthetic sequence
gaaaguucagggaugccgccuu

SEQ ID NO: 2415 - RNA, 22 nt, Artificial Sequence
  Synthetic sequence
gaaggcggcaucccugaacuuu

SEQ ID NO: 2416 - RNA, 22 nt, Artificial Sequence
  Synthetic sequence
gaugccgccuucagguguggcu

SEQ ID NO: 2417 - RNA, 22 nt, Artificial Sequence
  Synthetic sequence
gccacaccugaaggcggcaucc

SEQ ID NO: 2418 - RNA, 22 nt, Artificial Sequence
  Synthetic sequence
gccgccuucagguguggcuuga

SEQ ID NO: 2419 - RNA, 22 nt, Artificial Sequence
  Synthetic sequence
gcggcaucccugaacuuuccau

SEQ ID NO: 2420 - RNA, 22 nt, Artificial Sequence
  Synthetic sequence
ggaaaguucagggaugccgccu

SEQ ID NO: 2421 - RNA, 22 nt, Artificial Sequence
  Synthetic sequence
ggaugccgccuucagguguggc

SEQ ID NO: 2422 - RNA, 22 nt, Artificial Sequence
  Synthetic sequence
ggcaucccugaacuuuccauau

SEQ ID NO: 2423 - RNA, 22 nt, Artificial Sequence
  Synthetic sequence
ggcggcaucccugaacuuucca

SEQ ID NO: 2424 - RNA, 22 nt, Artificial Sequence
  Synthetic sequence
gggaugccgccuucaggugugg

SEQ ID NO: 2425 - RNA, 22 nt, Artificial Sequence
  Synthetic sequence
guucagggaugccgccuucagg

SEQ ID NO: 2426 - RNA, 22 nt, Artificial Sequence
  Synthetic sequence
uauauggaaaguucagggaugc

SEQ ID NO: 2427 - RNA, 22 nt, Artificial Sequence
  Synthetic sequence
uauggaaaguucagggaugccg

SEQ ID NO: 2428 - RNA, 22 nt, Artificial Sequence
  Synthetic sequence
ucaagccacaccugaaggcggc

SEQ ID NO: 2429 - RNA, 22 nt, Artificial Sequence
  Synthetic sequence
ucagggaugccgccuucaggug

SEQ ID NO: 2430 - RNA, 22 nt, Artificial Sequence
  Synthetic sequence
ugaaggcggcaucccugaacuu

SEQ ID NO: 2431 - RNA, 22 nt, Artificial Sequence
  Synthetic sequence
ugccgccuucagguguggcuug

SEQ ID NO: 2432 - RNA, 22 nt, Artificial Sequence
  Synthetic sequence
uggaaaguucagggaugccgcc

SEQ ID NO: 2433 - RNA, 22 nt, Artificial Sequence
  Synthetic sequence
uucagggaugccgccuucaggu

SEQ ID NO: 2434 - RNA, 21 nt, Artificial Sequence
  Synthetic sequence
aagccccagaggccacaggga

SEQ ID NO: 2435 - RNA, 21 nt, Artificial Sequence
  Synthetic sequence
acaccuuugucucugucccug

SEQ ID NO: 2436 - RNA, 21 nt, Artificial Sequence
  Synthetic sequence
accuuugucucugucccugug

SEQ ID NO: 2437 - RNA, 21 nt, Artificial Sequence
  Synthetic sequence
agaggccacagggacagagac

SEQ ID NO: 2438 - RNA, 21 nt, Artificial Sequence
  Synthetic sequence
agccccagaggccacagggac

SEQ ID NO: 2439 - RNA, 21 nt, Artificial Sequence
  Synthetic sequence
aggccacagggacagagacaa

SEQ ID NO: 2440 - RNA, 21 nt, Artificial Sequence
  Synthetic sequence
agggugucaagccccagaggc

SEQ ID NO: 2441 - RNA, 21 nt, Artificial Sequence
  Synthetic sequence
caagccccagaggccacaggg

SEQ ID NO: 2442 - RNA, 21 nt, Artificial Sequence
  Synthetic sequence
caccuuugucucugucccugu

SEQ ID NO: 2443 - RNA, 21 nt, Artificial Sequence
  Synthetic sequence
cagaggccacagggacagaga

SEQ ID NO: 2444 - RNA, 21 nt, Artificial Sequence
  Synthetic sequence
cagggugucaagccccagagg

SEQ ID NO: 2445 - RNA, 21 nt, Artificial Sequence
  Synthetic sequence
ccagaggccacagggacagag

SEQ ID NO: 2446 - RNA, 21 nt, Artificial Sequence
  Synthetic sequence
cccagaggccacagggacaga

SEQ ID NO: 2447 - RNA, 21 nt, Artificial Sequence
  Synthetic sequence
ccccagaggccacagggacag

SEQ ID NO: 2448 - RNA, 21 nt, Artificial Sequence
  Synthetic sequence
cccuguggccucuggggcuug

SEQ ID NO: 2449 - RNA, 21 nt, Artificial Sequence
  Synthetic sequence
ccuguggccucuggggcuuga

SEQ ID NO: 2450 - RNA, 21 nt, Artificial Sequence
  Synthetic sequence
ccuuugucucugucccugugg

SEQ ID NO: 2451 - RNA, 21 nt, Artificial Sequence
  Synthetic sequence
cgucagggugucaagccccag

SEQ ID NO: 2452 - RNA, 21 nt, Artificial Sequence
  Synthetic sequence
cucugucccuguggccucugg

SEQ ID NO: 2453 - RNA, 21 nt, Artificial Sequence
  Synthetic sequence
cugucccuguggccucugggg

SEQ ID NO: 2454 - RNA, 21 nt, Artificial Sequence
  Synthetic sequence
cuguggccucuggggcuugac

SEQ ID NO: 2455 - RNA, 21 nt, Artificial Sequence
  Synthetic sequence
cuuugucucugucccuguggc

SEQ ID NO: 2456 - RNA, 21 nt, Artificial Sequence
  Synthetic sequence
gacaccuuugucucugucccu

SEQ ID NO: 2457 - RNA, 21 nt, Artificial Sequence
  Synthetic sequence
gaggccacagggacagagaca

SEQ ID NO: 2458 - RNA, 21 nt, Artificial Sequence
  Synthetic sequence
gccacagggacagagacaaag

SEQ ID NO: 2459 - RNA, 21 nt, Artificial Sequence
  Synthetic sequence
gccccagaggccacagggaca

SEQ ID NO: 2460 - RNA, 21 nt, Artificial Sequence
  Synthetic sequence
ggccacagggacagagacaaa

SEQ ID NO: 2461 - RNA, 21 nt, Artificial Sequence
  Synthetic sequence
ggccucuggggcuugacaccc

SEQ ID NO: 2462 - RNA, 21 nt, Artificial Sequence
  Synthetic sequence
gggugucaagccccagaggcc

SEQ ID NO: 2463 - RNA, 21 nt, Artificial Sequence
  Synthetic sequence
ggugucaagccccagaggcca

SEQ ID NO: 2464 - RNA, 21 nt, Artificial Sequence
  Synthetic sequence
gucaagccccagaggccacag

SEQ ID NO: 2465 - RNA, 21 nt, Artificial Sequence
  Synthetic sequence
gucagggugucaagccccaga

SEQ ID NO: 2466 - RNA, 21 nt, Artificial Sequence
  Synthetic sequence
gucccuguggccucuggggcu

SEQ ID NO: 2467 - RNA, 21 nt, Artificial Sequence
  Synthetic sequence
gucucugucccuguggccucu

SEQ ID NO: 2468 - RNA, 21 nt, Artificial Sequence
  Synthetic sequence
guggccucuggggcuugacac

SEQ ID NO: 2469 - RNA, 21 nt, Artificial Sequence
  Synthetic sequence
gugucaagccccagaggccac

SEQ ID NO: 2470 - RNA, 21 nt, Artificial Sequence
  Synthetic sequence
ucaagccccagaggccacagg

SEQ ID NO: 2471 - RNA, 21 nt, Artificial Sequence
  Synthetic sequence
ucagggugucaagccccagag

SEQ ID NO: 2472 - RNA, 21 nt, Artificial Sequence
  Synthetic sequence
ucccuguggccucuggggcuu

SEQ ID NO: 2473 - RNA, 21 nt, Artificial Sequence
  Synthetic sequence
ucucugucccuguggccucug

SEQ ID NO: 2474 - RNA, 21 nt, Artificial Sequence
  Synthetic sequence
ucugucccuguggccucuggg

SEQ ID NO: 2475 - RNA, 21 nt, Artificial Sequence
  Synthetic sequence
uggccucuggggcuugacacc

SEQ ID NO: 2476 - RNA, 21 nt, Artificial Sequence
  Synthetic sequence
ugucaagccccagaggccaca

SEQ ID NO: 2477 - RNA, 21 nt, Artificial Sequence
  Synthetic sequence
ugucccuguggccucuggggc

SEQ ID NO: 2478 - RNA, 21 nt, Artificial Sequence
  Synthetic sequence
ugucucugucccuguggccuc

SEQ ID NO: 2479 - RNA, 21 nt, Artificial Sequence
  Synthetic sequence
uguggccucuggggcuugaca

SEQ ID NO: 2480 - RNA, 21 nt, Artificial Sequence
  Synthetic sequence
uugucucugucccuguggccu

SEQ ID NO: 2481 - RNA, 21 nt, Artificial Sequence
  Synthetic sequence
uuugucucugucccuguggcc

SEQ ID NO: 2482 - RNA, 22 nt, Artificial Sequence
  Synthetic sequence
aagccccagaggccacagggac

SEQ ID NO: 2483 - RNA, 22 nt, Artificial Sequence
  Synthetic sequence
acaccuuugucucugucccugu

SEQ ID NO: 2484 - RNA, 22 nt, Artificial Sequence
  Synthetic sequence
accuuugucucugucccugugg

SEQ ID NO: 2485 - RNA, 22 nt, Artificial Sequence
  Synthetic sequence
agaggccacagggacagagaca

SEQ ID NO: 2486 - RNA, 22 nt, Artificial Sequence
  Synthetic sequence
agccccagaggccacagggaca

SEQ ID NO: 2487 - RNA, 22 nt, Artificial Sequence
  Synthetic sequence
aggccacagggacagagacaaa

SEQ ID NO: 2488 - RNA, 22 nt, Artificial Sequence
  Synthetic sequence
agggugucaagccccagaggcc

SEQ ID NO: 2489 - RNA, 22 nt, Artificial Sequence
  Synthetic sequence
caagccccagaggccacaggga

SEQ ID NO: 2490 - RNA, 22 nt, Artificial Sequence
  Synthetic sequence
caccuuugucucugucccugug

SEQ ID NO: 2491 - RNA, 22 nt, Artificial Sequence
  Synthetic sequence
cagaggccacagggacagagac

SEQ ID NO: 2492 - RNA, 22 nt, Artificial Sequence
  Synthetic sequence
cagggugucaagccccagaggc

SEQ ID NO: 2493 - RNA, 22 nt, Artificial Sequence
  Synthetic sequence
ccagaggccacagggacagaga

SEQ ID NO: 2494 - RNA, 22 nt, Artificial Sequence
  Synthetic sequence
cccagaggccacagggacagag

SEQ ID NO: 2495 - RNA, 22 nt, Artificial Sequence
  Synthetic sequence
ccccagaggccacagggacaga

SEQ ID NO: 2496 - RNA, 22 nt, Artificial Sequence
  Synthetic sequence
cccuguggccucuggggcuuga

SEQ ID NO: 2497 - RNA, 22 nt, Artificial Sequence
  Synthetic sequence
ccuguggccucuggggcuugac

SEQ ID NO: 2498 - RNA, 22 nt, Artificial Sequence
  Synthetic sequence
ccuuugucucugucccuguggc

SEQ ID NO: 2499 - RNA, 22 nt, Artificial Sequence
  Synthetic sequence
cgucagggugucaagccccaga

SEQ ID NO: 2500 - RNA, 22 nt, Artificial Sequence
  Synthetic sequence
cucugucccuguggccucuggg

SEQ ID NO: 2501 - RNA, 22 nt, Artificial Sequence
  Synthetic sequence
cugucccuguggccucuggggc

SEQ ID NO: 2502 - RNA, 22 nt, Artificial Sequence
  Synthetic sequence
cuguggccucuggggcuugaca

SEQ ID NO: 2503 - RNA, 22 nt, Artificial Sequence
  Synthetic sequence
cuuugucucugucccuguggcc

SEQ ID NO: 2504 - RNA, 22 nt, Artificial Sequence
  Synthetic sequence
gacaccuuugucucugucccug

SEQ ID NO: 2505 - RNA, 22 nt, Artificial Sequence
  Synthetic sequence
gaggccacagggacagagacaa

SEQ ID NO: 2506 - RNA, 22 nt, Artificial Sequence
  Synthetic sequence
gccacagggacagagacaaagg

SEQ ID NO: 2507 - RNA, 22 nt, Artificial Sequence
  Synthetic sequence
gccccagaggccacagggacag

SEQ ID NO: 2508 - RNA, 22 nt, Artificial Sequence
  Synthetic sequence
ggccacagggacagagacaaag

SEQ ID NO: 2509 - RNA, 22 nt, Artificial Sequence
  Synthetic sequence
ggccucuggggcuugacacccu

SEQ ID NO: 2510 - RNA, 22 nt, Artificial Sequence
  Synthetic sequence
gggugucaagccccagaggcca

SEQ ID NO: 2511 - RNA, 22 nt, Artificial Sequence
  Synthetic sequence
ggugucaagccccagaggccac

SEQ ID NO: 2512 - RNA, 22 nt, Artificial Sequence
  Synthetic sequence
gucaagccccagaggccacagg

SEQ ID NO: 2513 - RNA, 22 nt, Artificial Sequence
  Synthetic sequence
gucagggugucaagccccagag

SEQ ID NO: 2514 - RNA, 22 nt, Artificial Sequence
  Synthetic sequence
gucccuguggccucuggggcuu

SEQ ID NO: 2515 - RNA, 22 nt, Artificial Sequence
  Synthetic sequence
gucucugucccuguggccucug

SEQ ID NO: 2516 - RNA, 22 nt, Artificial Sequence
  Synthetic sequence
guggccucuggggcuugacacc

SEQ ID NO: 2517 - RNA, 22 nt, Artificial Sequence
  Synthetic sequence
gugucaagccccagaggccaca

SEQ ID NO: 2518 - RNA, 22 nt, Artificial Sequence
  Synthetic sequence
ucaagccccagaggccacaggg

SEQ ID NO: 2519 - RNA, 22 nt, Artificial Sequence
  Synthetic sequence
ucagggugucaagccccagagg

SEQ ID NO: 2520 - RNA, 22 nt, Artificial Sequence
  Synthetic sequence
ucccuguggccucuggggcuug

SEQ ID NO: 2521 - RNA, 22 nt, Artificial Sequence
  Synthetic sequence
ucgucagggugucaagccccag

SEQ ID NO: 2522 - RNA, 22 nt, Artificial Sequence
  Synthetic sequence
ucucugucccuguggccucugg

SEQ ID NO: 2523 - RNA, 22 nt, Artificial Sequence
  Synthetic sequence
ucugucccuguggccucugggg

SEQ ID NO: 2524 - RNA, 22 nt, Artificial Sequence
  Synthetic sequence
ugacaccuuugucucugucccu

SEQ ID NO: 2525 - RNA, 22 nt, Artificial Sequence
  Synthetic sequence
uggccucuggggcuugacaccc

SEQ ID NO: 2526 - RNA, 22 nt, Artificial Sequence
  Synthetic sequence
ugucaagccccagaggccacag

SEQ ID NO: 2527 - RNA, 22 nt, Artificial Sequence
  Synthetic sequence
ugucccuguggccucuggggcu

SEQ ID NO: 2528 - RNA, 22 nt, Artificial Sequence
  Synthetic sequence
ugucucugucccuguggccucu

SEQ ID NO: 2529 - RNA, 22 nt, Artificial Sequence
  Synthetic sequence
uguggccucuggggcuugacac

SEQ ID NO: 2530 - RNA, 22 nt, Artificial Sequence
  Synthetic sequence
uugucucugucccuguggccuc

SEQ ID NO: 2531 - RNA, 22 nt, Artificial Sequence
  Synthetic sequence
uuugucucugucccuguggccu

SEQ ID NO: 2532 - RNA, 21 nt, Artificial Sequence
  Synthetic sequence
aagccccagaggacacaggga

SEQ ID NO: 2533 - RNA, 21 nt, Artificial Sequence
  Synthetic sequence
agaggacacagggacagagac

SEQ ID NO: 2534 - RNA, 21 nt, Artificial Sequence
  Synthetic sequence
agccccagaggacacagggac

SEQ ID NO: 2535 - RNA, 21 nt, Artificial Sequence
  Synthetic sequence
aggacacagggacagagacaa

SEQ ID NO: 2536 - RNA, 21 nt, Artificial Sequence
  Synthetic sequence
agggugucaagccccagagga

SEQ ID NO: 2537 - RNA, 21 nt, Artificial Sequence
  Synthetic sequence
caagccccagaggacacaggg

SEQ ID NO: 2538 - RNA, 21 nt, Artificial Sequence
  Synthetic sequence
cagaggacacagggacagaga

SEQ ID NO: 2539 - RNA, 21 nt, Artificial Sequence
  Synthetic sequence
ccagaggacacagggacagag

SEQ ID NO: 2540 - RNA, 21 nt, Artificial Sequence
  Synthetic sequence
cccagaggacacagggacaga

SEQ ID NO: 2541 - RNA, 21 nt, Artificial Sequence
  Synthetic sequence
ccccagaggacacagggacag

SEQ ID NO: 2542 - RNA, 21 nt, Artificial Sequence
  Synthetic sequence
cccuguguccucuggggcuug

SEQ ID NO: 2543 - RNA, 21 nt, Artificial Sequence
  Synthetic sequence
ccuguguccucuggggcuuga

SEQ ID NO: 2544 - RNA, 21 nt, Artificial Sequence
  Synthetic sequence
ccuuugucucugucccugugu

SEQ ID NO: 2545 - RNA, 21 nt, Artificial Sequence
  Synthetic sequence
cucugucccuguguccucugg

SEQ ID NO: 2546 - RNA, 21 nt, Artificial Sequence
  Synthetic sequence
cugucccuguguccucugggg

SEQ ID NO: 2547 - RNA, 21 nt, Artificial Sequence
  Synthetic sequence
cuguguccucuggggcuugac

SEQ ID NO: 2548 - RNA, 21 nt, Artificial Sequence
  Synthetic sequence
cuuugucucugucccuguguc

SEQ ID NO: 2549 - RNA, 21 nt, Artificial Sequence
  Synthetic sequence
gacacagggacagagacaaag

SEQ ID NO: 2550 - RNA, 21 nt, Artificial Sequence
  Synthetic sequence
gaggacacagggacagagaca

SEQ ID NO: 2551 - RNA, 21 nt, Artificial Sequence
  Synthetic sequence
gccccagaggacacagggaca

SEQ ID NO: 2552 - RNA, 21 nt, Artificial Sequence
  Synthetic sequence
ggacacagggacagagacaaa

SEQ ID NO: 2553 - RNA, 21 nt, Artificial Sequence
  Synthetic sequence
gggugucaagccccagaggac

SEQ ID NO: 2554 - RNA, 21 nt, Artificial Sequence
  Synthetic sequence
ggugucaagccccagaggaca

SEQ ID NO: 2555 - RNA, 21 nt, Artificial Sequence
  Synthetic sequence
gucaagccccagaggacacag

SEQ ID NO: 2556 - RNA, 21 nt, Artificial Sequence
  Synthetic sequence
gucccuguguccucuggggcu

SEQ ID NO: 2557 - RNA, 21 nt, Artificial Sequence
  Synthetic sequence
guccucuggggcuugacaccc

SEQ ID NO: 2558 - RNA, 21 nt, Artificial Sequence
  Synthetic sequence
gucucugucccuguguccucu

SEQ ID NO: 2559 - RNA, 21 nt, Artificial Sequence
  Synthetic sequence
gugucaagccccagaggacac

SEQ ID NO: 2560 - RNA, 21 nt, Artificial Sequence
  Synthetic sequence
guguccucuggggcuugacac

SEQ ID NO: 2561 - RNA, 21 nt, Artificial Sequence
  Synthetic sequence
ucaagccccagaggacacagg

SEQ ID NO: 2562 - RNA, 21 nt, Artificial Sequence
  Synthetic sequence
ucccuguguccucuggggcuu

SEQ ID NO: 2563 - RNA, 21 nt, Artificial Sequence
  Synthetic sequence
ucucugucccuguguccucug

SEQ ID NO: 2564 - RNA, 21 nt, Artificial Sequence
  Synthetic sequence
ucugucccuguguccucuggg

SEQ ID NO: 2565 - RNA, 21 nt, Artificial Sequence
  Synthetic sequence
ugucaagccccagaggacaca

SEQ ID NO: 2566 - RNA, 21 nt, Artificial Sequence
  Synthetic sequence
ugucccuguguccucuggggc

SEQ ID NO: 2567 - RNA, 21 nt, Artificial Sequence
  Synthetic sequence
uguccucuggggcuugacacc

SEQ ID NO: 2568 - RNA, 21 nt, Artificial Sequence
  Synthetic sequence
ugucucugucccuguguccuc

SEQ ID NO: 2569 - RNA, 21 nt, Artificial Sequence
  Synthetic sequence
uguguccucuggggcuugaca

SEQ ID NO: 2570 - RNA, 21 nt, Artificial Sequence
  Synthetic sequence
uugucucugucccuguguccu

SEQ ID NO: 2571 - RNA, 21 nt, Artificial Sequence
  Synthetic sequence
uuugucucugucccugugucc

SEQ ID NO: 2572 - RNA, 22 nt, Artificial Sequence
  Synthetic sequence
aagccccagaggacacagggac

SEQ ID NO: 2573 - RNA, 22 nt, Artificial Sequence
  Synthetic sequence
accuuugucucugucccugugu

SEQ ID NO: 2574 - RNA, 22 nt, Artificial Sequence
  Synthetic sequence
agaggacacagggacagagaca

SEQ ID NO: 2575 - RNA, 22 nt, Artificial Sequence
  Synthetic sequence
agccccagaggacacagggaca

SEQ ID NO: 2576 - RNA, 22 nt, Artificial Sequence
  Synthetic sequence
aggacacagggacagagacaaa

SEQ ID NO: 2577 - RNA, 22 nt, Artificial Sequence
  Synthetic sequence
agggugucaagccccagaggac

SEQ ID NO: 2578 - RNA, 22 nt, Artificial Sequence
  Synthetic sequence
caagccccagaggacacaggga

SEQ ID NO: 2579 - RNA, 22 nt, Artificial Sequence
  Synthetic sequence
cagaggacacagggacagagac

SEQ ID NO: 2580 - RNA, 22 nt, Artificial Sequence
  Synthetic sequence
cagggugucaagccccagagga

SEQ ID NO: 2581 - RNA, 22 nt, Artificial Sequence
  Synthetic sequence
ccagaggacacagggacagaga

SEQ ID NO: 2582 - RNA, 22 nt, Artificial Sequence
  Synthetic sequence
cccagaggacacagggacagag

SEQ ID NO: 2583 - RNA, 22 nt, Artificial Sequence
  Synthetic sequence
ccccagaggacacagggacaga

SEQ ID NO: 2584 - RNA, 22 nt, Artificial Sequence
  Synthetic sequence
cccuguguccucuggggcuuga

SEQ ID NO: 2585 - RNA, 22 nt, Artificial Sequence
  Synthetic sequence
ccuguguccucuggggcuugac

SEQ ID NO: 2586 - RNA, 22 nt, Artificial Sequence
  Synthetic sequence
ccuuugucucugucccuguguc

SEQ ID NO: 2587 - RNA, 22 nt, Artificial Sequence
  Synthetic sequence
cucugucccuguguccucuggg

SEQ ID NO: 2588 - RNA, 22 nt, Artificial Sequence
  Synthetic sequence
cugucccuguguccucuggggc

SEQ ID NO: 2589 - RNA, 22 nt, Artificial Sequence
  Synthetic sequence
cuguguccucuggggcuugaca

SEQ ID NO: 2590 - RNA, 22 nt, Artificial Sequence
  Synthetic sequence
cuuugucucugucccugugucc

SEQ ID NO: 2591 - RNA, 22 nt, Artificial Sequence
  Synthetic sequence
gacacagggacagagacaaagg

SEQ ID NO: 2592 - RNA, 22 nt, Artificial Sequence
  Synthetic sequence
gaggacacagggacagagacaa

SEQ ID NO: 2593 - RNA, 22 nt, Artificial Sequence
  Synthetic sequence
gccccagaggacacagggacag

SEQ ID NO: 2594 - RNA, 22 nt, Artificial Sequence
  Synthetic sequence
ggacacagggacagagacaaag

SEQ ID NO: 2595 - RNA, 22 nt, Artificial Sequence
  Synthetic sequence
gggugucaagccccagaggaca

SEQ ID NO: 2596 - RNA, 22 nt, Artificial Sequence
  Synthetic sequence
ggugucaagccccagaggacac

SEQ ID NO: 2597 - RNA, 22 nt, Artificial Sequence
  Synthetic sequence
gucaagccccagaggacacagg

SEQ ID NO: 2598 - RNA, 22 nt, Artificial Sequence
  Synthetic sequence
gucccuguguccucuggggcuu

SEQ ID NO: 2599 - RNA, 22 nt, Artificial Sequence
  Synthetic sequence
guccucuggggcuugacacccu

SEQ ID NO: 2600 - RNA, 22 nt, Artificial Sequence
  Synthetic sequence
gucucugucccuguguccucug

SEQ ID NO: 2601 - RNA, 22 nt, Artificial Sequence
  Synthetic sequence
gugucaagccccagaggacaca

SEQ ID NO: 2602 - RNA, 22 nt, Artificial Sequence
  Synthetic sequence
guguccucuggggcuugacacc

SEQ ID NO: 2603 - RNA, 22 nt, Artificial Sequence
  Synthetic sequence
ucaagccccagaggacacaggg

SEQ ID NO: 2604 - RNA, 22 nt, Artificial Sequence
  Synthetic sequence
ucccuguguccucuggggcuug

SEQ ID NO: 2605 - RNA, 22 nt, Artificial Sequence
  Synthetic sequence
ucucugucccuguguccucugg

SEQ ID NO: 2606 - RNA, 22 nt, Artificial Sequence
  Synthetic sequence
ucugucccuguguccucugggg

SEQ ID NO: 2607 - RNA, 22 nt, Artificial Sequence
  Synthetic sequence
ugucaagccccagaggacacag

SEQ ID NO: 2608 - RNA, 22 nt, Artificial Sequence
  Synthetic sequence
ugucccuguguccucuggggcu

SEQ ID NO: 2609 - RNA, 22 nt, Artificial Sequence
  Synthetic sequence
uguccucuggggcuugacaccc

SEQ ID NO: 2610 - RNA, 22 nt, Artificial Sequence
  Synthetic sequence
ugucucugucccuguguccucu

SEQ ID NO: 2611 - RNA, 22 nt, Artificial Sequence
  Synthetic sequence
uguguccucuggggcuugacac

SEQ ID NO: 2612 - RNA, 22 nt, Artificial Sequence
  Synthetic sequence
uugucucugucccuguguccuc

SEQ ID NO: 2613 - RNA, 22 nt, Artificial Sequence
  Synthetic sequence
uuugucucugucccuguguccu

SEQ ID NO: 2614 - RNA, 21 nt, Artificial Sequence
  Synthetic sequence
aaacacccugggggacucugg

SEQ ID NO: 2615 - RNA, 21 nt, Artificial Sequence
  Synthetic sequence
aacacccugggggacucuggg

SEQ ID NO: 2616 - RNA, 21 nt, Artificial Sequence
  Synthetic sequence
aacuucaccacacccagaguc

SEQ ID NO: 2617 - RNA, 21 nt, Artificial Sequence
  Synthetic sequence
acacccagagucccccagggu

SEQ ID NO: 2618 - RNA, 21 nt, Artificial Sequence
  Synthetic sequence
acacccugggggacucugggu

SEQ ID NO: 2619 - RNA, 21 nt, Artificial Sequence
  Synthetic sequence
accacacccagagucccccag

SEQ ID NO: 2620 - RNA, 21 nt, Artificial Sequence
  Synthetic sequence
acccagagucccccagggugu

SEQ ID NO: 2621 - RNA, 21 nt, Artificial Sequence
  Synthetic sequence
acccugggggacucugggugu

SEQ ID NO: 2622 - RNA, 21 nt, Artificial Sequence
  Synthetic sequence
acuucaccacacccagagucc

SEQ ID NO: 2623 - RNA, 21 nt, Artificial Sequence
  Synthetic sequence
agagucccccaggguguuuca

SEQ ID NO: 2624 - RNA, 21 nt, Artificial Sequence
  Synthetic sequence
aggauugugaaacacccuggg

SEQ ID NO: 2625 - RNA, 21 nt, Artificial Sequence
  Synthetic sequence
agucccccaggguguuucaca

SEQ ID NO: 2626 - RNA, 21 nt, Artificial Sequence
  Synthetic sequence
auugugaaacacccuggggga

SEQ ID NO: 2627 - RNA, 21 nt, Artificial Sequence
  Synthetic sequence
caacuucaccacacccagagu

SEQ ID NO: 2628 - RNA, 21 nt, Artificial Sequence
  Synthetic sequence
cacacccagagucccccaggg

SEQ ID NO: 2629 - RNA, 21 nt, Artificial Sequence
  Synthetic sequence
caccacacccagaguccccca

SEQ ID NO: 2630 - RNA, 21 nt, Artificial Sequence
  Synthetic sequence
cacccagagucccccagggug

SEQ ID NO: 2631 - RNA, 21 nt, Artificial Sequence
  Synthetic sequence
cacccugggggacucugggug

SEQ ID NO: 2632 - RNA, 21 nt, Artificial Sequence
  Synthetic sequence
cagagucccccaggguguuuc

SEQ ID NO: 2633 - RNA, 21 nt, Artificial Sequence
  Synthetic sequence
ccaacuucaccacacccagag

SEQ ID NO: 2634 - RNA, 21 nt, Artificial Sequence
  Synthetic sequence
ccacacccagagucccccagg

SEQ ID NO: 2635 - RNA, 21 nt, Artificial Sequence
  Synthetic sequence
ccagagucccccaggguguuu

SEQ ID NO: 2636 - RNA, 21 nt, Artificial Sequence
  Synthetic sequence
cccaacuucaccacacccaga

SEQ ID NO: 2637 - RNA, 21 nt, Artificial Sequence
  Synthetic sequence
cccagagucccccaggguguu

SEQ ID NO: 2638 - RNA, 21 nt, Artificial Sequence
  Synthetic sequence
cccccaggguguuucacaauc

SEQ ID NO: 2639 - RNA, 21 nt, Artificial Sequence
  Synthetic sequence
cccugggggacucugggugug

SEQ ID NO: 2640 - RNA, 21 nt, Artificial Sequence
  Synthetic sequence
ccugggggacucugggugugg

SEQ ID NO: 2641 - RNA, 21 nt, Artificial Sequence
  Synthetic sequence
cuaggauugugaaacacccug

SEQ ID NO: 2642 - RNA, 21 nt, Artificial Sequence
  Synthetic sequence
cugggggacucuggguguggu

SEQ ID NO: 2643 - RNA, 21 nt, Artificial Sequence
  Synthetic sequence
cuucaccacacccagaguccc

SEQ ID NO: 2644 - RNA, 21 nt, Artificial Sequence
  Synthetic sequence
gaaacacccugggggacucug

SEQ ID NO: 2645 - RNA, 21 nt, Artificial Sequence
  Synthetic sequence
gagucccccaggguguuucac

SEQ ID NO: 2646 - RNA, 21 nt, Artificial Sequence
  Synthetic sequence
gauugugaaacacccuggggg

SEQ ID NO: 2647 - RNA, 21 nt, Artificial Sequence
  Synthetic sequence
gcuaggauugugaaacacccu

SEQ ID NO: 2648 - RNA, 21 nt, Artificial Sequence
  Synthetic sequence
ggauugugaaacacccugggg

SEQ ID NO: 2649 - RNA, 21 nt, Artificial Sequence
  Synthetic sequence
gggacucuggguguggugaag

SEQ ID NO: 2650 - RNA, 21 nt, Artificial Sequence
  Synthetic sequence
ggggacucuggguguggugaa

SEQ ID NO: 2651 - RNA, 21 nt, Artificial Sequence
  Synthetic sequence
gggggacucugggugugguga

SEQ ID NO: 2652 - RNA, 21 nt, Artificial Sequence
  Synthetic sequence
gucccccaggguguuucacaa

SEQ ID NO: 2653 - RNA, 21 nt, Artificial Sequence
  Synthetic sequence
gugaaacacccugggggacuc

SEQ ID NO: 2654 - RNA, 21 nt, Artificial Sequence
  Synthetic sequence
uaggauugugaaacacccugg

SEQ ID NO: 2655 - RNA, 21 nt, Artificial Sequence
  Synthetic sequence
ucaccacacccagaguccccc

SEQ ID NO: 2656 - RNA, 21 nt, Artificial Sequence
  Synthetic sequence
ucccccaggguguuucacaau

SEQ ID NO: 2657 - RNA, 21 nt, Artificial Sequence
  Synthetic sequence
ugaaacacccugggggacucu

SEQ ID NO: 2658 - RNA, 21 nt, Artificial Sequence
  Synthetic sequence
ugggggacucuggguguggug

SEQ ID NO: 2659 - RNA, 21 nt, Artificial Sequence
  Synthetic sequence
ugugaaacacccugggggacu

SEQ ID NO: 2660 - RNA, 21 nt, Artificial Sequence
  Synthetic sequence
uucaccacacccagagucccc

SEQ ID NO: 2661 - RNA, 21 nt, Artificial Sequence
  Synthetic sequence
uugugaaacacccugggggac

SEQ ID NO: 2662 - RNA, 22 nt, Artificial Sequence
  Synthetic sequence
aaacacccugggggacucuggg

SEQ ID NO: 2663 - RNA, 22 nt, Artificial Sequence
  Synthetic sequence
aacacccugggggacucugggu

SEQ ID NO: 2664 - RNA, 22 nt, Artificial Sequence
  Synthetic sequence
aacuucaccacacccagagucc

SEQ ID NO: 2665 - RNA, 22 nt, Artificial Sequence
  Synthetic sequence
acacccagagucccccagggug

SEQ ID NO: 2666 - RNA, 22 nt, Artificial Sequence
  Synthetic sequence
acacccugggggacucugggug

SEQ ID NO: 2667 - RNA, 22 nt, Artificial Sequence
  Synthetic sequence
accacacccagagucccccagg

SEQ ID NO: 2668 - RNA, 22 nt, Artificial Sequence
  Synthetic sequence
acccagagucccccaggguguu

SEQ ID NO: 2669 - RNA, 22 nt, Artificial Sequence
  Synthetic sequence
acccugggggacucugggugug

SEQ ID NO: 2670 - RNA, 22 nt, Artificial Sequence
  Synthetic sequence
acuucaccacacccagaguccc

SEQ ID NO: 2671 - RNA, 22 nt, Artificial Sequence
  Synthetic sequence
agagucccccaggguguuucac

SEQ ID NO: 2672 - RNA, 22 nt, Artificial Sequence
  Synthetic sequence
agcuaggauugugaaacacccu

SEQ ID NO: 2673 - RNA, 22 nt, Artificial Sequence
  Synthetic sequence
aggauugugaaacacccugggg

SEQ ID NO: 2674 - RNA, 22 nt, Artificial Sequence
  Synthetic sequence
agucccccaggguguuucacaa

SEQ ID NO: 2675 - RNA, 22 nt, Artificial Sequence
  Synthetic sequence
auugugaaacacccugggggac

SEQ ID NO: 2676 - RNA, 22 nt, Artificial Sequence
  Synthetic sequence
caacuucaccacacccagaguc

SEQ ID NO: 2677 - RNA, 22 nt, Artificial Sequence
  Synthetic sequence
cacacccagagucccccagggu

SEQ ID NO: 2678 - RNA, 22 nt, Artificial Sequence
  Synthetic sequence
caccacacccagagucccccag

SEQ ID NO: 2679 - RNA, 22 nt, Artificial Sequence
  Synthetic sequence
cacccagagucccccagggugu

SEQ ID NO: 2680 - RNA, 22 nt, Artificial Sequence
  Synthetic sequence
cacccugggggacucugggugu

SEQ ID NO: 2681 - RNA, 22 nt, Artificial Sequence
  Synthetic sequence
cagagucccccaggguguuuca

SEQ ID NO: 2682 - RNA, 22 nt, Artificial Sequence
  Synthetic sequence
ccaacuucaccacacccagagu

SEQ ID NO: 2683 - RNA, 22 nt, Artificial Sequence
  Synthetic sequence
ccacacccagagucccccaggg

SEQ ID NO: 2684 - RNA, 22 nt, Artificial Sequence
  Synthetic sequence
ccagagucccccaggguguuuc

SEQ ID NO: 2685 - RNA, 22 nt, Artificial Sequence
  Synthetic sequence
cccaacuucaccacacccagag

SEQ ID NO: 2686 - RNA, 22 nt, Artificial Sequence
  Synthetic sequence
cccagagucccccaggguguuu

SEQ ID NO: 2687 - RNA, 22 nt, Artificial Sequence
  Synthetic sequence
ccccaacuucaccacacccaga

SEQ ID NO: 2688 - RNA, 22 nt, Artificial Sequence
  Synthetic sequence
cccccaggguguuucacaaucc

SEQ ID NO: 2689 - RNA, 22 nt, Artificial Sequence
  Synthetic sequence
cccugggggacucugggugugg

SEQ ID NO: 2690 - RNA, 22 nt, Artificial Sequence
  Synthetic sequence
ccugggggacucuggguguggu

SEQ ID NO: 2691 - RNA, 22 nt, Artificial Sequence
  Synthetic sequence
cuaggauugugaaacacccugg

SEQ ID NO: 2692 - RNA, 22 nt, Artificial Sequence
  Synthetic sequence
cugggggacucuggguguggug

SEQ ID NO: 2693 - RNA, 22 nt, Artificial Sequence
  Synthetic sequence
cuucaccacacccagagucccc

SEQ ID NO: 2694 - RNA, 22 nt, Artificial Sequence
  Synthetic sequence
gaaacacccugggggacucugg

SEQ ID NO: 2695 - RNA, 22 nt, Artificial Sequence
  Synthetic sequence
gagucccccaggguguuucaca

SEQ ID NO: 2696 - RNA, 22 nt, Artificial Sequence
  Synthetic sequence
gauugugaaacacccuggggga

SEQ ID NO: 2697 - RNA, 22 nt, Artificial Sequence
  Synthetic sequence
gcuaggauugugaaacacccug

SEQ ID NO: 2698 - RNA, 22 nt, Artificial Sequence
  Synthetic sequence
ggauugugaaacacccuggggg

SEQ ID NO: 2699 - RNA, 22 nt, Artificial Sequence
  Synthetic sequence
gggacucuggguguggugaagu

SEQ ID NO: 2700 - RNA, 22 nt, Artificial Sequence
  Synthetic sequence
ggggacucuggguguggugaag

SEQ ID NO: 2701 - RNA, 22 nt, Artificial Sequence
  Synthetic sequence
gggggacucuggguguggugaa

SEQ ID NO: 2702 - RNA, 22 nt, Artificial Sequence
  Synthetic sequence
gucccccaggguguuucacaau

SEQ ID NO: 2703 - RNA, 22 nt, Artificial Sequence
  Synthetic sequence
gugaaacacccugggggacucu

SEQ ID NO: 2704 - RNA, 22 nt, Artificial Sequence
  Synthetic sequence
uaggauugugaaacacccuggg

SEQ ID NO: 2705 - RNA, 22 nt, Artificial Sequence
  Synthetic sequence
ucaccacacccagaguccccca

SEQ ID NO: 2706 - RNA, 22 nt, Artificial Sequence
  Synthetic sequence
ucccccaggguguuucacaauc

SEQ ID NO: 2707 - RNA, 22 nt, Artificial Sequence
  Synthetic sequence
ugaaacacccugggggacucug

SEQ ID NO: 2708 - RNA, 22 nt, Artificial Sequence
  Synthetic sequence
ugggggacucugggugugguga

SEQ ID NO: 2709 - RNA, 22 nt, Artificial Sequence
  Synthetic sequence
ugugaaacacccugggggacuc

SEQ ID NO: 2710 - RNA, 22 nt, Artificial Sequence
  Synthetic sequence
uucaccacacccagaguccccc

SEQ ID NO: 2711 - RNA, 22 nt, Artificial Sequence
  Synthetic sequence
uugugaaacacccugggggacu

SEQ ID NO: 2712 - RNA, 21 nt, Artificial Sequence
  Synthetic sequence
aaacacccugggugacucugg

SEQ ID NO: 2713 - RNA, 21 nt, Artificial Sequence
  Synthetic sequence
aacacccugggugacucuggg

SEQ ID NO: 2714 - RNA, 21 nt, Artificial Sequence
  Synthetic sequence
acacccagagucacccagggu

SEQ ID NO: 2715 - RNA, 21 nt, Artificial Sequence
  Synthetic sequence
acacccugggugacucugggu

SEQ ID NO: 2716 - RNA, 21 nt, Artificial Sequence
  Synthetic sequence
accacacccagagucacccag

SEQ ID NO: 2717 - RNA, 21 nt, Artificial Sequence
  Synthetic sequence
acccagagucacccagggugu

SEQ ID NO: 2718 - RNA, 21 nt, Artificial Sequence
  Synthetic sequence
acccugggugacucugggugu

SEQ ID NO: 2719 - RNA, 21 nt, Artificial Sequence
  Synthetic sequence
acuucaccacacccagaguca

SEQ ID NO: 2720 - RNA, 21 nt, Artificial Sequence
  Synthetic sequence
agagucacccaggguguuuca

SEQ ID NO: 2721 - RNA, 21 nt, Artificial Sequence
  Synthetic sequence
agucacccaggguguuucaca

SEQ ID NO: 2722 - RNA, 21 nt, Artificial Sequence
  Synthetic sequence
auugugaaacacccuggguga

SEQ ID NO: 2723 - RNA, 21 nt, Artificial Sequence
  Synthetic sequence
cacacccagagucacccaggg

SEQ ID NO: 2724 - RNA, 21 nt, Artificial Sequence
  Synthetic sequence
caccacacccagagucaccca

SEQ ID NO: 2725 - RNA, 21 nt, Artificial Sequence
  Synthetic sequence
cacccagagucacccagggug

SEQ ID NO: 2726 - RNA, 21 nt, Artificial Sequence
  Synthetic sequence
cacccaggguguuucacaauc

SEQ ID NO: 2727 - RNA, 21 nt, Artificial Sequence
  Synthetic sequence
cacccugggugacucugggug

SEQ ID NO: 2728 - RNA, 21 nt, Artificial Sequence
  Synthetic sequence
cagagucacccaggguguuuc

SEQ ID NO: 2729 - RNA, 21 nt, Artificial Sequence
  Synthetic sequence
ccacacccagagucacccagg

SEQ ID NO: 2730 - RNA, 21 nt, Artificial Sequence
  Synthetic sequence
ccagagucacccaggguguuu

SEQ ID NO: 2731 - RNA, 21 nt, Artificial Sequence
  Synthetic sequence
cccagagucacccaggguguu

SEQ ID NO: 2732 - RNA, 21 nt, Artificial Sequence
  Synthetic sequence
cccugggugacucugggugug

SEQ ID NO: 2733 - RNA, 21 nt, Artificial Sequence
  Synthetic sequence
ccugggugacucugggugugg

SEQ ID NO: 2734 - RNA, 21 nt, Artificial Sequence
  Synthetic sequence
cugggugacucuggguguggu

SEQ ID NO: 2735 - RNA, 21 nt, Artificial Sequence
  Synthetic sequence
cuucaccacacccagagucac

SEQ ID NO: 2736 - RNA, 21 nt, Artificial Sequence
  Synthetic sequence
gaaacacccugggugacucug

SEQ ID NO: 2737 - RNA, 21 nt, Artificial Sequence
  Synthetic sequence
gagucacccaggguguuucac

SEQ ID NO: 2738 - RNA, 21 nt, Artificial Sequence
  Synthetic sequence
gauugugaaacacccugggug

SEQ ID NO: 2739 - RNA, 21 nt, Artificial Sequence
  Synthetic sequence
ggauugugaaacacccugggu

SEQ ID NO: 2740 - RNA, 21 nt, Artificial Sequence
  Synthetic sequence
gggugacucugggugugguga

SEQ ID NO: 2741 - RNA, 21 nt, Artificial Sequence
  Synthetic sequence
ggugacucuggguguggugaa

SEQ ID NO: 2742 - RNA, 21 nt, Artificial Sequence
  Synthetic sequence
gucacccaggguguuucacaa

SEQ ID NO: 2743 - RNA, 21 nt, Artificial Sequence
  Synthetic sequence
gugaaacacccugggugacuc

SEQ ID NO: 2744 - RNA, 21 nt, Artificial Sequence
  Synthetic sequence
gugacucuggguguggugaag

SEQ ID NO: 2745 - RNA, 21 nt, Artificial Sequence
  Synthetic sequence
ucaccacacccagagucaccc

SEQ ID NO: 2746 - RNA, 21 nt, Artificial Sequence
  Synthetic sequence
ucacccaggguguuucacaau

SEQ ID NO: 2747 - RNA, 21 nt, Artificial Sequence
  Synthetic sequence
ugaaacacccugggugacucu

SEQ ID NO: 2748 - RNA, 21 nt, Artificial Sequence
  Synthetic sequence
ugggugacucuggguguggug

SEQ ID NO: 2749 - RNA, 21 nt, Artificial Sequence
  Synthetic sequence
ugugaaacacccugggugacu

SEQ ID NO: 2750 - RNA, 21 nt, Artificial Sequence
  Synthetic sequence
uucaccacacccagagucacc

SEQ ID NO: 2751 - RNA, 21 nt, Artificial Sequence
  Synthetic sequence
uugugaaacacccugggugac

SEQ ID NO: 2752 - RNA, 22 nt, Artificial Sequence
  Synthetic sequence
aaacacccugggugacucuggg

SEQ ID NO: 2753 - RNA, 22 nt, Artificial Sequence
  Synthetic sequence
aacacccugggugacucugggu

SEQ ID NO: 2754 - RNA, 22 nt, Artificial Sequence
  Synthetic sequence
aacuucaccacacccagaguca

SEQ ID NO: 2755 - RNA, 22 nt, Artificial Sequence
  Synthetic sequence
acacccagagucacccagggug

SEQ ID NO: 2756 - RNA, 22 nt, Artificial Sequence
  Synthetic sequence
acacccugggugacucugggug

SEQ ID NO: 2757 - RNA, 22 nt, Artificial Sequence
  Synthetic sequence
accacacccagagucacccagg

SEQ ID NO: 2758 - RNA, 22 nt, Artificial Sequence
  Synthetic sequence
acccagagucacccaggguguu

SEQ ID NO: 2759 - RNA, 22 nt, Artificial Sequence
  Synthetic sequence
acccugggugacucugggugug

SEQ ID NO: 2760 - RNA, 22 nt, Artificial Sequence
  Synthetic sequence
acuucaccacacccagagucac

SEQ ID NO: 2761 - RNA, 22 nt, Artificial Sequence
  Synthetic sequence
agagucacccaggguguuucac

SEQ ID NO: 2762 - RNA, 22 nt, Artificial Sequence
  Synthetic sequence
aggauugugaaacacccugggu

SEQ ID NO: 2763 - RNA, 22 nt, Artificial Sequence
  Synthetic sequence
agucacccaggguguuucacaa

SEQ ID NO: 2764 - RNA, 22 nt, Artificial Sequence
  Synthetic sequence
auugugaaacacccugggugac

SEQ ID NO: 2765 - RNA, 22 nt, Artificial Sequence
  Synthetic sequence
cacacccagagucacccagggu

SEQ ID NO: 2766 - RNA, 22 nt, Artificial Sequence
  Synthetic sequence
caccacacccagagucacccag

SEQ ID NO: 2767 - RNA, 22 nt, Artificial Sequence
  Synthetic sequence
cacccagagucacccagggugu

SEQ ID NO: 2768 - RNA, 22 nt, Artificial Sequence
  Synthetic sequence
cacccaggguguuucacaaucc

SEQ ID NO: 2769 - RNA, 22 nt, Artificial Sequence
  Synthetic sequence
cacccugggugacucugggugu

SEQ ID NO: 2770 - RNA, 22 nt, Artificial Sequence
  Synthetic sequence
cagagucacccaggguguuuca

SEQ ID NO: 2771 - RNA, 22 nt, Artificial Sequence
  Synthetic sequence
ccacacccagagucacccaggg

SEQ ID NO: 2772 - RNA, 22 nt, Artificial Sequence
  Synthetic sequence
ccagagucacccaggguguuuc

SEQ ID NO: 2773 - RNA, 22 nt, Artificial Sequence
  Synthetic sequence
cccagagucacccaggguguuu

SEQ ID NO: 2774 - RNA, 22 nt, Artificial Sequence
  Synthetic sequence
cccugggugacucugggugugg

SEQ ID NO: 2775 - RNA, 22 nt, Artificial Sequence
  Synthetic sequence
ccugggugacucuggguguggu

SEQ ID NO: 2776 - RNA, 22 nt, Artificial Sequence
  Synthetic sequence
cugggugacucuggguguggug

SEQ ID NO: 2777 - RNA, 22 nt, Artificial Sequence
  Synthetic sequence
cuucaccacacccagagucacc

SEQ ID NO: 2778 - RNA, 22 nt, Artificial Sequence
  Synthetic sequence
gaaacacccugggugacucugg

SEQ ID NO: 2779 - RNA, 22 nt, Artificial Sequence
  Synthetic sequence
gagucacccaggguguuucaca

SEQ ID NO: 2780 - RNA, 22 nt, Artificial Sequence
  Synthetic sequence
gauugugaaacacccuggguga

SEQ ID NO: 2781 - RNA, 22 nt, Artificial Sequence
  Synthetic sequence
ggauugugaaacacccugggug

SEQ ID NO: 2782 - RNA, 22 nt, Artificial Sequence
  Synthetic sequence
gggugacucuggguguggugaa

SEQ ID NO: 2783 - RNA, 22 nt, Artificial Sequence
  Synthetic sequence
ggugacucuggguguggugaag

SEQ ID NO: 2784 - RNA, 22 nt, Artificial Sequence
  Synthetic sequence
gucacccaggguguuucacaau

SEQ ID NO: 2785 - RNA, 22 nt, Artificial Sequence
  Synthetic sequence
gugaaacacccugggugacucu

SEQ ID NO: 2786 - RNA, 22 nt, Artificial Sequence
  Synthetic sequence
gugacucuggguguggugaagu

SEQ ID NO: 2787 - RNA, 22 nt, Artificial Sequence
  Synthetic sequence
ucaccacacccagagucaccca

SEQ ID NO: 2788 - RNA, 22 nt, Artificial Sequence
  Synthetic sequence
ucacccaggguguuucacaauc

SEQ ID NO: 2789 - RNA, 22 nt, Artificial Sequence
  Synthetic sequence
ugaaacacccugggugacucug

SEQ ID NO: 2790 - RNA, 22 nt, Artificial Sequence
  Synthetic sequence
ugggugacucugggugugguga

SEQ ID NO: 2791 - RNA, 22 nt, Artificial Sequence
  Synthetic sequence
ugugaaacacccugggugacuc

SEQ ID NO: 2792 - RNA, 22 nt, Artificial Sequence
  Synthetic sequence
uucaccacacccagagucaccc

SEQ ID NO: 2793 - RNA, 22 nt, Artificial Sequence
  Synthetic sequence
uugugaaacacccugggugacu

SEQ ID NO: 2794 - RNA, 21 nt, Artificial Sequence
  Synthetic sequence
acacccccuuccugcccaccu

SEQ ID NO: 2795 - RNA, 21 nt, Artificial Sequence
  Synthetic sequence
acacggacgguccuccagccc

SEQ ID NO: 2796 - RNA, 21 nt, Artificial Sequence
  Synthetic sequence
acccccuuccugcccaccugg

SEQ ID NO: 2797 - RNA, 21 nt, Artificial Sequence
  Synthetic sequence
accuggaggggcuggaggacc

SEQ ID NO: 2798 - RNA, 21 nt, Artificial Sequence
  Synthetic sequence
acggacgguccuccagccccu

SEQ ID NO: 2799 - RNA, 21 nt, Artificial Sequence
  Synthetic sequence
acgguccuccagccccuccag

SEQ ID NO: 2800 - RNA, 21 nt, Artificial Sequence
  Synthetic sequence
agccccuccaggugggcagga

SEQ ID NO: 2801 - RNA, 21 nt, Artificial Sequence
  Synthetic sequence
cacacggacgguccuccagcc

SEQ ID NO: 2802 - RNA, 21 nt, Artificial Sequence
  Synthetic sequence
cacccccuuccugcccaccug

SEQ ID NO: 2803 - RNA, 21 nt, Artificial Sequence
  Synthetic sequence
caccuggaggggcuggaggac

SEQ ID NO: 2804 - RNA, 21 nt, Artificial Sequence
  Synthetic sequence
cacggacgguccuccagcccc

SEQ ID NO: 2805 - RNA, 21 nt, Artificial Sequence
  Synthetic sequence
cagccccuccaggugggcagg

SEQ ID NO: 2806 - RNA, 21 nt, Artificial Sequence
  Synthetic sequence
ccaccuggaggggcuggagga

SEQ ID NO: 2807 - RNA, 21 nt, Artificial Sequence
  Synthetic sequence
ccagccccuccaggugggcag

SEQ ID NO: 2808 - RNA, 21 nt, Artificial Sequence
  Synthetic sequence
cccaccuggaggggcuggagg

SEQ ID NO: 2809 - RNA, 21 nt, Artificial Sequence
  Synthetic sequence
cccccuuccugcccaccugga

SEQ ID NO: 2810 - RNA, 21 nt, Artificial Sequence
  Synthetic sequence
ccccuccaggugggcaggaag

SEQ ID NO: 2811 - RNA, 21 nt, Artificial Sequence
  Synthetic sequence
ccccuuccugcccaccuggag

SEQ ID NO: 2812 - RNA, 21 nt, Artificial Sequence
  Synthetic sequence
cccuccaggugggcaggaagg

SEQ ID NO: 2813 - RNA, 21 nt, Artificial Sequence
  Synthetic sequence
cccuuccugcccaccuggagg

SEQ ID NO: 2814 - RNA, 21 nt, Artificial Sequence
  Synthetic sequence
ccuccagccccuccagguggg

SEQ ID NO: 2815 - RNA, 21 nt, Artificial Sequence
  Synthetic sequence
ccuccaggugggcaggaaggg

SEQ ID NO: 2816 - RNA, 21 nt, Artificial Sequence
  Synthetic sequence
ccugcccaccuggaggggcug

SEQ ID NO: 2817 - RNA, 21 nt, Artificial Sequence
  Synthetic sequence
ccuggaggggcuggaggaccg

SEQ ID NO: 2818 - RNA, 21 nt, Artificial Sequence
  Synthetic sequence
ccuuccugcccaccuggaggg

SEQ ID NO: 2819 - RNA, 21 nt, Artificial Sequence
  Synthetic sequence
cggacgguccuccagccccuc

SEQ ID NO: 2820 - RNA, 21 nt, Artificial Sequence
  Synthetic sequence
cgguccuccagccccuccagg

SEQ ID NO: 2821 - RNA, 21 nt, Artificial Sequence
  Synthetic sequence
cuccagccccuccaggugggc

SEQ ID NO: 2822 - RNA, 21 nt, Artificial Sequence
  Synthetic sequence
cuccaggugggcaggaagggg

SEQ ID NO: 2823 - RNA, 21 nt, Artificial Sequence
  Synthetic sequence
cugcccaccuggaggggcugg

SEQ ID NO: 2824 - RNA, 21 nt, Artificial Sequence
  Synthetic sequence
cuggaggggcuggaggaccgu

SEQ ID NO: 2825 - RNA, 21 nt, Artificial Sequence
  Synthetic sequence
cuuccugcccaccuggagggg

SEQ ID NO: 2826 - RNA, 21 nt, Artificial Sequence
  Synthetic sequence
gacacccccuuccugcccacc

SEQ ID NO: 2827 - RNA, 21 nt, Artificial Sequence
  Synthetic sequence
gacgguccuccagccccucca

SEQ ID NO: 2828 - RNA, 21 nt, Artificial Sequence
  Synthetic sequence
gaggggcuggaggaccguccg

SEQ ID NO: 2829 - RNA, 21 nt, Artificial Sequence
  Synthetic sequence
gcccaccuggaggggcuggag

SEQ ID NO: 2830 - RNA, 21 nt, Artificial Sequence
  Synthetic sequence
gccccuccaggugggcaggaa

SEQ ID NO: 2831 - RNA, 21 nt, Artificial Sequence
  Synthetic sequence
ggacgguccuccagccccucc

SEQ ID NO: 2832 - RNA, 21 nt, Artificial Sequence
  Synthetic sequence
ggaggggcuggaggaccgucc

SEQ ID NO: 2833 - RNA, 21 nt, Artificial Sequence
  Synthetic sequence
gguccuccagccccuccaggu

SEQ ID NO: 2834 - RNA, 21 nt, Artificial Sequence
  Synthetic sequence
guccuccagccccuccaggug

SEQ ID NO: 2835 - RNA, 21 nt, Artificial Sequence
  Synthetic sequence
ucacacggacgguccuccagc

SEQ ID NO: 2836 - RNA, 21 nt, Artificial Sequence
  Synthetic sequence
uccagccccuccaggugggca

SEQ ID NO: 2837 - RNA, 21 nt, Artificial Sequence
  Synthetic sequence
uccuccagccccuccaggugg

SEQ ID NO: 2838 - RNA, 21 nt, Artificial Sequence
  Synthetic sequence
uccugcccaccuggaggggcu

SEQ ID NO: 2839 - RNA, 21 nt, Artificial Sequence
  Synthetic sequence
ugcccaccuggaggggcugga

SEQ ID NO: 2840 - RNA, 21 nt, Artificial Sequence
  Synthetic sequence
uggaggggcuggaggaccguc

SEQ ID NO: 2841 - RNA, 21 nt, Artificial Sequence
  Synthetic sequence
uuccugcccaccuggaggggc

SEQ ID NO: 2842 - RNA, 22 nt, Artificial Sequence
  Synthetic sequence
acacccccuuccugcccaccug

SEQ ID NO: 2843 - RNA, 22 nt, Artificial Sequence
  Synthetic sequence
acacggacgguccuccagcccc

SEQ ID NO: 2844 - RNA, 22 nt, Artificial Sequence
  Synthetic sequence
acccccuuccugcccaccugga

SEQ ID NO: 2845 - RNA, 22 nt, Artificial Sequence
  Synthetic sequence
accuggaggggcuggaggaccg

SEQ ID NO: 2846 - RNA, 22 nt, Artificial Sequence
  Synthetic sequence
acggacgguccuccagccccuc

SEQ ID NO: 2847 - RNA, 22 nt, Artificial Sequence
  Synthetic sequence
acgguccuccagccccuccagg

SEQ ID NO: 2848 - RNA, 22 nt, Artificial Sequence
  Synthetic sequence
agacacccccuuccugcccacc

SEQ ID NO: 2849 - RNA, 22 nt, Artificial Sequence
  Synthetic sequence
agccccuccaggugggcaggaa

SEQ ID NO: 2850 - RNA, 22 nt, Artificial Sequence
  Synthetic sequence
cacacggacgguccuccagccc

SEQ ID NO: 2851 - RNA, 22 nt, Artificial Sequence
  Synthetic sequence
cacccccuuccugcccaccugg

SEQ ID NO: 2852 - RNA, 22 nt, Artificial Sequence
  Synthetic sequence
caccuggaggggcuggaggacc

SEQ ID NO: 2853 - RNA, 22 nt, Artificial Sequence
  Synthetic sequence
cacggacgguccuccagccccu

SEQ ID NO: 2854 - RNA, 22 nt, Artificial Sequence
  Synthetic sequence
cagccccuccaggugggcagga

SEQ ID NO: 2855 - RNA, 22 nt, Artificial Sequence
  Synthetic sequence
ccaccuggaggggcuggaggac

SEQ ID NO: 2856 - RNA, 22 nt, Artificial Sequence
  Synthetic sequence
ccagccccuccaggugggcagg

SEQ ID NO: 2857 - RNA, 22 nt, Artificial Sequence
  Synthetic sequence
cccaccuggaggggcuggagga

SEQ ID NO: 2858 - RNA, 22 nt, Artificial Sequence
  Synthetic sequence
cccccuuccugcccaccuggag

SEQ ID NO: 2859 - RNA, 22 nt, Artificial Sequence
  Synthetic sequence
ccccuccaggugggcaggaagg

SEQ ID NO: 2860 - RNA, 22 nt, Artificial Sequence
  Synthetic sequence
ccccuuccugcccaccuggagg

SEQ ID NO: 2861 - RNA, 22 nt, Artificial Sequence
  Synthetic sequence
cccuccaggugggcaggaaggg

SEQ ID NO: 2862 - RNA, 22 nt, Artificial Sequence
  Synthetic sequence
cccuuccugcccaccuggaggg

SEQ ID NO: 2863 - RNA, 22 nt, Artificial Sequence
  Synthetic sequence
ccuccagccccuccaggugggc

SEQ ID NO: 2864 - RNA, 22 nt, Artificial Sequence
  Synthetic sequence
ccuccaggugggcaggaagggg

SEQ ID NO: 2865 - RNA, 22 nt, Artificial Sequence
  Synthetic sequence
ccugcccaccuggaggggcugg

SEQ ID NO: 2866 - RNA, 22 nt, Artificial Sequence
  Synthetic sequence
ccuggaggggcuggaggaccgu

SEQ ID NO: 2867 - RNA, 22 nt, Artificial Sequence
  Synthetic sequence
ccuuccugcccaccuggagggg

SEQ ID NO: 2868 - RNA, 22 nt, Artificial Sequence
  Synthetic sequence
cggacgguccuccagccccucc

SEQ ID NO: 2869 - RNA, 22 nt, Artificial Sequence
  Synthetic sequence
cgguccuccagccccuccaggu

SEQ ID NO: 2870 - RNA, 22 nt, Artificial Sequence
  Synthetic sequence
cuccagccccuccaggugggca

SEQ ID NO: 2871 - RNA, 22 nt, Artificial Sequence
  Synthetic sequence
cuccaggugggcaggaaggggg

SEQ ID NO: 2872 - RNA, 22 nt, Artificial Sequence
  Synthetic sequence
cugcccaccuggaggggcugga

SEQ ID NO: 2873 - RNA, 22 nt, Artificial Sequence
  Synthetic sequence
cuggaggggcuggaggaccguc

SEQ ID NO: 2874 - RNA, 22 nt, Artificial Sequence
  Synthetic sequence
cuuccugcccaccuggaggggc

SEQ ID NO: 2875 - RNA, 22 nt, Artificial Sequence
  Synthetic sequence
gacacccccuuccugcccaccu

SEQ ID NO: 2876 - RNA, 22 nt, Artificial Sequence
  Synthetic sequence
gacgguccuccagccccuccag

SEQ ID NO: 2877 - RNA, 22 nt, Artificial Sequence
  Synthetic sequence
gaggggcuggaggaccguccgu

SEQ ID NO: 2878 - RNA, 22 nt, Artificial Sequence
  Synthetic sequence
gcccaccuggaggggcuggagg

SEQ ID NO: 2879 - RNA, 22 nt, Artificial Sequence
  Synthetic sequence
gccccuccaggugggcaggaag

SEQ ID NO: 2880 - RNA, 22 nt, Artificial Sequence
  Synthetic sequence
ggacgguccuccagccccucca

SEQ ID NO: 2881 - RNA, 22 nt, Artificial Sequence
  Synthetic sequence
ggaggggcuggaggaccguccg

SEQ ID NO: 2882 - RNA, 22 nt, Artificial Sequence
  Synthetic sequence
gguccuccagccccuccaggug

SEQ ID NO: 2883 - RNA, 22 nt, Artificial Sequence
  Synthetic sequence
gucacacggacgguccuccagc

SEQ ID NO: 2884 - RNA, 22 nt, Artificial Sequence
  Synthetic sequence
guccuccagccccuccaggugg

SEQ ID NO: 2885 - RNA, 22 nt, Artificial Sequence
  Synthetic sequence
ucacacggacgguccuccagcc

SEQ ID NO: 2886 - RNA, 22 nt, Artificial Sequence
  Synthetic sequence
uccagccccuccaggugggcag

SEQ ID NO: 2887 - RNA, 22 nt, Artificial Sequence
  Synthetic sequence
uccuccagccccuccagguggg

SEQ ID NO: 2888 - RNA, 22 nt, Artificial Sequence
  Synthetic sequence
uccugcccaccuggaggggcug

SEQ ID NO: 2889 - RNA, 22 nt, Artificial Sequence
  Synthetic sequence
ugcccaccuggaggggcuggag

SEQ ID NO: 2890 - RNA, 22 nt, Artificial Sequence
  Synthetic sequence
uggaggggcuggaggaccgucc

SEQ ID NO: 2891 - RNA, 22 nt, Artificial Sequence
  Synthetic sequence
uuccugcccaccuggaggggcu

SEQ ID NO: 2892 - RNA, 21 nt, Artificial Sequence
  Synthetic sequence
accuggcggggcuggaggacc

SEQ ID NO: 2893 - RNA, 21 nt, Artificial Sequence
  Synthetic sequence
acggacgguccuccagccccg

SEQ ID NO: 2894 - RNA, 21 nt, Artificial Sequence
  Synthetic sequence
acgguccuccagccccgccag

SEQ ID NO: 2895 - RNA, 21 nt, Artificial Sequence
  Synthetic sequence
agccccgccaggugggcagga

SEQ ID NO: 2896 - RNA, 21 nt, Artificial Sequence
  Synthetic sequence
caccuggcggggcuggaggac

SEQ ID NO: 2897 - RNA, 21 nt, Artificial Sequence
  Synthetic sequence
ccaccuggcggggcuggagga

SEQ ID NO: 2898 - RNA, 21 nt, Artificial Sequence
  Synthetic sequence
cccccuuccugcccaccuggc

SEQ ID NO: 2899 - RNA, 21 nt, Artificial Sequence
  Synthetic sequence
ccccgccaggugggcaggaag

SEQ ID NO: 2900 - RNA, 21 nt, Artificial Sequence
  Synthetic sequence
ccccuuccugcccaccuggcg

SEQ ID NO: 2901 - RNA, 21 nt, Artificial Sequence
  Synthetic sequence
cccgccaggugggcaggaagg

SEQ ID NO: 2902 - RNA, 21 nt, Artificial Sequence
  Synthetic sequence
cccuuccugcccaccuggcgg

SEQ ID NO: 2903 - RNA, 21 nt, Artificial Sequence
  Synthetic sequence
ccgccaggugggcaggaaggg

SEQ ID NO: 2904 - RNA, 21 nt, Artificial Sequence
  Synthetic sequence
ccuuccugcccaccuggcggg

SEQ ID NO: 2905 - RNA, 21 nt, Artificial Sequence
  Synthetic sequence
cgccaggugggcaggaagggg

SEQ ID NO: 2906 - RNA, 21 nt, Artificial Sequence
  Synthetic sequence
cuggcggggcuggaggaccgu

SEQ ID NO: 2907 - RNA, 21 nt, Artificial Sequence
  Synthetic sequence
cuuccugcccaccuggcgggg

SEQ ID NO: 2908 - RNA, 21 nt, Artificial Sequence
  Synthetic sequence
gacgguccuccagccccgcca

SEQ ID NO: 2909 - RNA, 21 nt, Artificial Sequence
  Synthetic sequence
gccccgccaggugggcaggaa

SEQ ID NO: 2910 - RNA, 21 nt, Artificial Sequence
  Synthetic sequence
gguccuccagccccgccaggu

SEQ ID NO: 2911 - RNA, 21 nt, Artificial Sequence
  Synthetic sequence
guccuccagccccgccaggug

SEQ ID NO: 2912 - RNA, 21 nt, Artificial Sequence
  Synthetic sequence
uccagccccgccaggugggca

SEQ ID NO: 2913 - RNA, 21 nt, Artificial Sequence
  Synthetic sequence
uccuccagccccgccaggugg

SEQ ID NO: 2914 - RNA, 21 nt, Artificial Sequence
  Synthetic sequence
uccugcccaccuggcggggcu

SEQ ID NO: 2915 - RNA, 21 nt, Artificial Sequence
  Synthetic sequence
ugcccaccuggcggggcugga

SEQ ID NO: 2916 - RNA, 21 nt, Artificial Sequence
  Synthetic sequence
uggcggggcuggaggaccguc

SEQ ID NO: 2917 - RNA, 21 nt, Artificial Sequence
  Synthetic sequence
uuccugcccaccuggcggggc

SEQ ID NO: 2918 - RNA, 22 nt, Artificial Sequence
  Synthetic sequence
acccccuuccugcccaccuggc

SEQ ID NO: 2919 - RNA, 22 nt, Artificial Sequence
  Synthetic sequence
accuggcggggcuggaggaccg

SEQ ID NO: 2920 - RNA, 22 nt, Artificial Sequence
  Synthetic sequence
acggacgguccuccagccccgc

SEQ ID NO: 2921 - RNA, 22 nt, Artificial Sequence
  Synthetic sequence
acgguccuccagccccgccagg

SEQ ID NO: 2922 - RNA, 22 nt, Artificial Sequence
  Synthetic sequence
agccccgccaggugggcaggaa

SEQ ID NO: 2923 - RNA, 22 nt, Artificial Sequence
  Synthetic sequence
caccuggcggggcuggaggacc

SEQ ID NO: 2924 - RNA, 22 nt, Artificial Sequence
  Synthetic sequence
cacggacgguccuccagccccg

SEQ ID NO: 2925 - RNA, 22 nt, Artificial Sequence
  Synthetic sequence
cagccccgccaggugggcagga

SEQ ID NO: 2926 - RNA, 22 nt, Artificial Sequence
  Synthetic sequence
ccaccuggcggggcuggaggac

SEQ ID NO: 2927 - RNA, 22 nt, Artificial Sequence
  Synthetic sequence
cccaccuggcggggcuggagga

SEQ ID NO: 2928 - RNA, 22 nt, Artificial Sequence
  Synthetic sequence
cccccuuccugcccaccuggcg

SEQ ID NO: 2929 - RNA, 22 nt, Artificial Sequence
  Synthetic sequence
ccccgccaggugggcaggaagg

SEQ ID NO: 2930 - RNA, 22 nt, Artificial Sequence
  Synthetic sequence
ccccuuccugcccaccuggcgg

SEQ ID NO: 2931 - RNA, 22 nt, Artificial Sequence
  Synthetic sequence
cccgccaggugggcaggaaggg

SEQ ID NO: 2932 - RNA, 22 nt, Artificial Sequence
  Synthetic sequence
cccuuccugcccaccuggcggg

SEQ ID NO: 2933 - RNA, 22 nt, Artificial Sequence
  Synthetic sequence
ccgccaggugggcaggaagggg

SEQ ID NO: 2934 - RNA, 22 nt, Artificial Sequence
  Synthetic sequence
ccuggcggggcuggaggaccgu

SEQ ID NO: 2935 - RNA, 22 nt, Artificial Sequence
  Synthetic sequence
ccuuccugcccaccuggcgggg

SEQ ID NO: 2936 - RNA, 22 nt, Artificial Sequence
  Synthetic sequence
cgccaggugggcaggaaggggg

SEQ ID NO: 2937 - RNA, 22 nt, Artificial Sequence
  Synthetic sequence
cgguccuccagccccgccaggu

SEQ ID NO: 2938 - RNA, 22 nt, Artificial Sequence
  Synthetic sequence
cuccagccccgccaggugggca

SEQ ID NO: 2939 - RNA, 22 nt, Artificial Sequence
  Synthetic sequence
cugcccaccuggcggggcugga

SEQ ID NO: 2940 - RNA, 22 nt, Artificial Sequence
  Synthetic sequence
cuggcggggcuggaggaccguc

SEQ ID NO: 2941 - RNA, 22 nt, Artificial Sequence
  Synthetic sequence
cuuccugcccaccuggcggggc

SEQ ID NO: 2942 - RNA, 22 nt, Artificial Sequence
  Synthetic sequence
gacgguccuccagccccgccag

SEQ ID NO: 2943 - RNA, 22 nt, Artificial Sequence
  Synthetic sequence
gccccgccaggugggcaggaag

SEQ ID NO: 2944 - RNA, 22 nt, Artificial Sequence
  Synthetic sequence
gcggggcuggaggaccguccgu

SEQ ID NO: 2945 - RNA, 22 nt, Artificial Sequence
  Synthetic sequence
ggacgguccuccagccccgcca

SEQ ID NO: 2946 - RNA, 22 nt, Artificial Sequence
  Synthetic sequence
gguccuccagccccgccaggug

SEQ ID NO: 2947 - RNA, 22 nt, Artificial Sequence
  Synthetic sequence
guccuccagccccgccaggugg

SEQ ID NO: 2948 - RNA, 22 nt, Artificial Sequence
  Synthetic sequence
uccagccccgccaggugggcag

SEQ ID NO: 2949 - RNA, 22 nt, Artificial Sequence
  Synthetic sequence
uccuccagccccgccagguggg

SEQ ID NO: 2950 - RNA, 22 nt, Artificial Sequence
  Synthetic sequence
uccugcccaccuggcggggcug

SEQ ID NO: 2951 - RNA, 22 nt, Artificial Sequence
  Synthetic sequence
ugcccaccuggcggggcuggag

SEQ ID NO: 2952 - RNA, 22 nt, Artificial Sequence
  Synthetic sequence
uggcggggcuggaggaccgucc

SEQ ID NO: 2953 - RNA, 22 nt, Artificial Sequence
  Synthetic sequence
uuccugcccaccuggcggggcu

SEQ ID NO: 2954 - RNA, 20 nt, Artificial Sequence
  Synthetic sequence
aacaggcaccguggcuagac

SEQ ID NO: 2955 - RNA, 20 nt, Artificial Sequence
  Synthetic sequence
aacccugacaggcggcgggc

SEQ ID NO: 2956 - RNA, 20 nt, Artificial Sequence
  Synthetic sequence
aagcuggacugcgaggcccu

SEQ ID NO: 2957 - RNA, 20 nt, Artificial Sequence
  Synthetic sequence
aagguggggaagcuggacug

SEQ ID NO: 2958 - RNA, 20 nt, Artificial Sequence
  Synthetic sequence
aagucccuccuagggucuag

SEQ ID NO: 2959 - RNA, 20 nt, Artificial Sequence
  Synthetic sequence
acaagguggggaagcuggac

SEQ ID NO: 2960 - RNA, 20 nt, Artificial Sequence
  Synthetic sequence
acaggcaccguggcuagacc

SEQ ID NO: 2961 - RNA, 20 nt, Artificial Sequence
  Synthetic sequence
acaggcggcgggcagguggg

SEQ ID NO: 2962 - RNA, 20 nt, Artificial Sequence
  Synthetic sequence
acccgcucccagcccggacu

SEQ ID NO: 2963 - RNA, 20 nt, Artificial Sequence
  Synthetic sequence
acccuaggagggacuuccca

SEQ ID NO: 2964 - RNA, 20 nt, Artificial Sequence
  Synthetic sequence
acccugacaggcggcgggca

SEQ ID NO: 2965 - RNA, 20 nt, Artificial Sequence
  Synthetic sequence
accguggcuagacccuagga

SEQ ID NO: 2966 - RNA, 20 nt, Artificial Sequence
  Synthetic sequence
accugcccgccgccugucag

SEQ ID NO: 2967 - RNA, 20 nt, Artificial Sequence
  Synthetic sequence
acggugccuguugcugcagu

SEQ ID NO: 2968 - RNA, 20 nt, Artificial Sequence
  Synthetic sequence
acgugcccugggugucccuc

SEQ ID NO: 2969 - RNA, 20 nt, Artificial Sequence
  Synthetic sequence
acugcagcaacaggcaccgu

SEQ ID NO: 2970 - RNA, 20 nt, Artificial Sequence
  Synthetic sequence
acugcgaggcccugcccacc

SEQ ID NO: 2971 - RNA, 20 nt, Artificial Sequence
  Synthetic sequence
acuucccaacccugacaggc

SEQ ID NO: 2972 - RNA, 20 nt, Artificial Sequence
  Synthetic sequence
agacaagguggggaagcugg

SEQ ID NO: 2973 - RNA, 20 nt, Artificial Sequence
  Synthetic sequence
agacccuaggagggacuucc

SEQ ID NO: 2974 - RNA, 20 nt, Artificial Sequence
  Synthetic sequence
agcaacaggcaccguggcua

SEQ ID NO: 2975 - RNA, 20 nt, Artificial Sequence
  Synthetic sequence
agcagagggacacccagggc

SEQ ID NO: 2976 - RNA, 20 nt, Artificial Sequence
  Synthetic sequence
agccacggugccuguugcug

SEQ ID NO: 2977 - RNA, 20 nt, Artificial Sequence
  Synthetic sequence
agcccggacugcagcaacag

SEQ ID NO: 2978 - RNA, 20 nt, Artificial Sequence
  Synthetic sequence
agcggguggggagcagaggg

SEQ ID NO: 2979 - RNA, 20 nt, Artificial Sequence
  Synthetic sequence
agcuggacugcgaggcccug

SEQ ID NO: 2980 - RNA, 20 nt, Artificial Sequence
  Synthetic sequence
agcuuccccaccuugucugc

SEQ ID NO: 2981 - RNA, 20 nt, Artificial Sequence
  Synthetic sequence
aggagggacuucccaacccu

SEQ ID NO: 2982 - RNA, 20 nt, Artificial Sequence
  Synthetic sequence
aggcaccguggcuagacccu

SEQ ID NO: 2983 - RNA, 20 nt, Artificial Sequence
  Synthetic sequence
aggcagacaagguggggaag

SEQ ID NO: 2984 - RNA, 20 nt, Artificial Sequence
  Synthetic sequence
agggacuucccaacccugac

SEQ ID NO: 2985 - RNA, 20 nt, Artificial Sequence
  Synthetic sequence
agggccucgcaguccagcuu

SEQ ID NO: 2986 - RNA, 20 nt, Artificial Sequence
  Synthetic sequence
agggucuagccacggugccu

SEQ ID NO: 2987 - RNA, 20 nt, Artificial Sequence
  Synthetic sequence
aggguugggaagucccuccu

SEQ ID NO: 2988 - RNA, 20 nt, Artificial Sequence
  Synthetic sequence
aggugggcagggccucgcag

SEQ ID NO: 2989 - RNA, 20 nt, Artificial Sequence
  Synthetic sequence
agguggggaagcuggacugc

SEQ ID NO: 2990 - RNA, 20 nt, Artificial Sequence
  Synthetic sequence
aguccagcuuccccaccuug

SEQ ID NO: 2991 - RNA, 20 nt, Artificial Sequence
  Synthetic sequence
agucccuccuagggucuagc

SEQ ID NO: 2992 - RNA, 20 nt, Artificial Sequence
  Synthetic sequence
aguccgggcugggagcgggu

SEQ ID NO: 2993 - RNA, 20 nt, Artificial Sequence
  Synthetic sequence
caacaggcaccguggcuaga

SEQ ID NO: 2994 - RNA, 20 nt, Artificial Sequence
  Synthetic sequence
caacccugacaggcggcggg

SEQ ID NO: 2995 - RNA, 20 nt, Artificial Sequence
  Synthetic sequence
caagguggggaagcuggacu

SEQ ID NO: 2996 - RNA, 20 nt, Artificial Sequence
  Synthetic sequence
cacccgcucccagcccggac

SEQ ID NO: 2997 - RNA, 20 nt, Artificial Sequence
  Synthetic sequence
caccguggcuagacccuagg

SEQ ID NO: 2998 - RNA, 20 nt, Artificial Sequence
  Synthetic sequence
caccugcccgccgccuguca

SEQ ID NO: 2999 - RNA, 20 nt, Artificial Sequence
  Synthetic sequence
cacggugccuguugcugcag

SEQ ID NO: 3000 - RNA, 20 nt, Artificial Sequence
  Synthetic sequence
cagacaagguggggaagcug

SEQ ID NO: 3001 - RNA, 20 nt, Artificial Sequence
  Synthetic sequence
cagagggacacccagggcac

SEQ ID NO: 3002 - RNA, 20 nt, Artificial Sequence
  Synthetic sequence
cagcaacaggcaccguggcu

SEQ ID NO: 3003 - RNA, 20 nt, Artificial Sequence
  Synthetic sequence
cagcccggacugcagcaaca

SEQ ID NO: 3004 - RNA, 20 nt, Artificial Sequence
  Synthetic sequence
cagcuuccccaccuugucug

SEQ ID NO: 3005 - RNA, 20 nt, Artificial Sequence
  Synthetic sequence
caggcaccguggcuagaccc

SEQ ID NO: 3006 - RNA, 20 nt, Artificial Sequence
  Synthetic sequence
cagggccucgcaguccagcu

SEQ ID NO: 3007 - RNA, 20 nt, Artificial Sequence
  Synthetic sequence
caggguugggaagucccucc

SEQ ID NO: 3008 - RNA, 20 nt, Artificial Sequence
  Synthetic sequence
caggugggcagggccucgca

SEQ ID NO: 3009 - RNA, 20 nt, Artificial Sequence
  Synthetic sequence
caguccagcuuccccaccuu

SEQ ID NO: 3010 - RNA, 20 nt, Artificial Sequence
  Synthetic sequence
caguccgggcugggagcggg

SEQ ID NO: 3011 - RNA, 20 nt, Artificial Sequence
  Synthetic sequence
ccaacccugacaggcggcgg

SEQ ID NO: 3012 - RNA, 20 nt, Artificial Sequence
  Synthetic sequence
ccacccgcucccagcccgga

SEQ ID NO: 3013 - RNA, 20 nt, Artificial Sequence
  Synthetic sequence
ccaccugcccgccgccuguc

SEQ ID NO: 3014 - RNA, 20 nt, Artificial Sequence
  Synthetic sequence
ccacggugccuguugcugca

SEQ ID NO: 3015 - RNA, 20 nt, Artificial Sequence
  Synthetic sequence
ccagcccggacugcagcaac

SEQ ID NO: 3016 - RNA, 20 nt, Artificial Sequence
  Synthetic sequence
ccagcuuccccaccuugucu

SEQ ID NO: 3017 - RNA, 20 nt, Artificial Sequence
  Synthetic sequence
cccaacccugacaggcggcg

SEQ ID NO: 3018 - RNA, 20 nt, Artificial Sequence
  Synthetic sequence
cccacccgcucccagcccgg

SEQ ID NO: 3019 - RNA, 20 nt, Artificial Sequence
  Synthetic sequence
cccaccugcccgccgccugu

SEQ ID NO: 3020 - RNA, 20 nt, Artificial Sequence
  Synthetic sequence
cccagcccggacugcagcaa

SEQ ID NO: 3021 - RNA, 20 nt, Artificial Sequence
  Synthetic sequence
ccccacccgcucccagcccg

SEQ ID NO: 3022 - RNA, 20 nt, Artificial Sequence
  Synthetic sequence
cccgccgccugucaggguug

SEQ ID NO: 3023 - RNA, 20 nt, Artificial Sequence
  Synthetic sequence
cccgcucccagcccggacug

SEQ ID NO: 3024 - RNA, 20 nt, Artificial Sequence
  Synthetic sequence
cccggacugcagcaacaggc

SEQ ID NO: 3025 - RNA, 20 nt, Artificial Sequence
  Synthetic sequence
cccuaggagggacuucccaa

SEQ ID NO: 3026 - RNA, 20 nt, Artificial Sequence
  Synthetic sequence
cccuccuagggucuagccac

SEQ ID NO: 3027 - RNA, 20 nt, Artificial Sequence
  Synthetic sequence
cccucugcuccccacccgcu

SEQ ID NO: 3028 - RNA, 20 nt, Artificial Sequence
  Synthetic sequence
cccugacaggcggcgggcag

SEQ ID NO: 3029 - RNA, 20 nt, Artificial Sequence
  Synthetic sequence
cccugggugucccucugcuc

SEQ ID NO: 3030 - RNA, 20 nt, Artificial Sequence
  Synthetic sequence
ccgccgccugucaggguugg

SEQ ID NO: 3031 - RNA, 20 nt, Artificial Sequence
  Synthetic sequence
ccgccugucaggguugggaa

SEQ ID NO: 3032 - RNA, 20 nt, Artificial Sequence
  Synthetic sequence
ccgcucccagcccggacugc

SEQ ID NO: 3033 - RNA, 20 nt, Artificial Sequence
  Synthetic sequence
ccggacugcagcaacaggca

SEQ ID NO: 3034 - RNA, 20 nt, Artificial Sequence
  Synthetic sequence
ccguggcuagacccuaggag

SEQ ID NO: 3035 - RNA, 20 nt, Artificial Sequence
  Synthetic sequence
ccuaggagggacuucccaac

SEQ ID NO: 3036 - RNA, 20 nt, Artificial Sequence
  Synthetic sequence
ccuagggucuagccacggug

SEQ ID NO: 3037 - RNA, 20 nt, Artificial Sequence
  Synthetic sequence
ccuccuagggucuagccacg

SEQ ID NO: 3038 - RNA, 20 nt, Artificial Sequence
  Synthetic sequence
ccucgcaguccagcuucccc

SEQ ID NO: 3039 - RNA, 20 nt, Artificial Sequence
  Synthetic sequence
ccucugcuccccacccgcuc

SEQ ID NO: 3040 - RNA, 20 nt, Artificial Sequence
  Synthetic sequence
ccugacaggcggcgggcagg

SEQ ID NO: 3041 - RNA, 20 nt, Artificial Sequence
  Synthetic sequence
ccugcccaccugcccgccgc

SEQ ID NO: 3042 - RNA, 20 nt, Artificial Sequence
  Synthetic sequence
ccugcccgccgccugucagg

SEQ ID NO: 3043 - RNA, 20 nt, Artificial Sequence
  Synthetic sequence
ccugggugucccucugcucc

SEQ ID NO: 3044 - RNA, 20 nt, Artificial Sequence
  Synthetic sequence
ccugucaggguugggaaguc

SEQ ID NO: 3045 - RNA, 20 nt, Artificial Sequence
  Synthetic sequence
ccuguugcugcaguccgggc

SEQ ID NO: 3046 - RNA, 20 nt, Artificial Sequence
  Synthetic sequence
cgcaguccagcuuccccacc

SEQ ID NO: 3047 - RNA, 20 nt, Artificial Sequence
  Synthetic sequence
cgccgccugucaggguuggg

SEQ ID NO: 3048 - RNA, 20 nt, Artificial Sequence
  Synthetic sequence
cgccugucaggguugggaag

SEQ ID NO: 3049 - RNA, 20 nt, Artificial Sequence
  Synthetic sequence
cgcucccagcccggacugca

SEQ ID NO: 3050 - RNA, 20 nt, Artificial Sequence
  Synthetic sequence
cggacugcagcaacaggcac

SEQ ID NO: 3051 - RNA, 20 nt, Artificial Sequence
  Synthetic sequence
cgggcaggugggcagggccu

SEQ ID NO: 3052 - RNA, 20 nt, Artificial Sequence
  Synthetic sequence
cgggcugggagcgggugggg

SEQ ID NO: 3053 - RNA, 20 nt, Artificial Sequence
  Synthetic sequence
cggguggggagcagagggac

SEQ ID NO: 3054 - RNA, 20 nt, Artificial Sequence
  Synthetic sequence
cggugccuguugcugcaguc

SEQ ID NO: 3055 - RNA, 20 nt, Artificial Sequence
  Synthetic sequence
cgugcccugggugucccucu

SEQ ID NO: 3056 - RNA, 20 nt, Artificial Sequence
  Synthetic sequence
cguggcuagacccuaggagg

SEQ ID NO: 3057 - RNA, 20 nt, Artificial Sequence
  Synthetic sequence
cuagacccuaggagggacuu

SEQ ID NO: 3058 - RNA, 20 nt, Artificial Sequence
  Synthetic sequence
cuagccacggugccuguugc

SEQ ID NO: 3059 - RNA, 20 nt, Artificial Sequence
  Synthetic sequence
cuaggagggacuucccaacc

SEQ ID NO: 3060 - RNA, 20 nt, Artificial Sequence
  Synthetic sequence
cuagggucuagccacggugc

SEQ ID NO: 3061 - RNA, 20 nt, Artificial Sequence
  Synthetic sequence
cucccagcccggacugcagc

SEQ ID NO: 3062 - RNA, 20 nt, Artificial Sequence
  Synthetic sequence
cuccccacccgcucccagcc

SEQ ID NO: 3063 - RNA, 20 nt, Artificial Sequence
  Synthetic sequence
cuccuagggucuagccacgg

SEQ ID NO: 3064 - RNA, 20 nt, Artificial Sequence
  Synthetic sequence
cucgcaguccagcuucccca

SEQ ID NO: 3065 - RNA, 20 nt, Artificial Sequence
  Synthetic sequence
cucugcuccccacccgcucc

SEQ ID NO: 3066 - RNA, 20 nt, Artificial Sequence
  Synthetic sequence
cugacaggcggcgggcaggu

SEQ ID NO: 3067 - RNA, 20 nt, Artificial Sequence
  Synthetic sequence
cugcagcaacaggcaccgug

SEQ ID NO: 3068 - RNA, 20 nt, Artificial Sequence
  Synthetic sequence
cugcaguccgggcugggagc

SEQ ID NO: 3069 - RNA, 20 nt, Artificial Sequence
  Synthetic sequence
cugcccaccugcccgccgcc

SEQ ID NO: 3070 - RNA, 20 nt, Artificial Sequence
  Synthetic sequence
cugcccgccgccugucaggg

SEQ ID NO: 3071 - RNA, 20 nt, Artificial Sequence
  Synthetic sequence
cugcgaggcccugcccaccu

SEQ ID NO: 3072 - RNA, 20 nt, Artificial Sequence
  Synthetic sequence
cugcuccccacccgcuccca

SEQ ID NO: 3073 - RNA, 20 nt, Artificial Sequence
  Synthetic sequence
cuggacugcgaggcccugcc

SEQ ID NO: 3074 - RNA, 20 nt, Artificial Sequence
  Synthetic sequence
cugggagcggguggggagca

SEQ ID NO: 3075 - RNA, 20 nt, Artificial Sequence
  Synthetic sequence
cugggugucccucugcuccc

SEQ ID NO: 3076 - RNA, 20 nt, Artificial Sequence
  Synthetic sequence
cugucaggguugggaagucc

SEQ ID NO: 3077 - RNA, 20 nt, Artificial Sequence
  Synthetic sequence
cuguggaggcagacaaggug

SEQ ID NO: 3078 - RNA, 20 nt, Artificial Sequence
  Synthetic sequence
cuguugcugcaguccgggcu

SEQ ID NO: 3079 - RNA, 20 nt, Artificial Sequence
  Synthetic sequence
cuucccaacccugacaggcg

SEQ ID NO: 3080 - RNA, 20 nt, Artificial Sequence
  Synthetic sequence
cuuccccaccuugucugccu

SEQ ID NO: 3081 - RNA, 20 nt, Artificial Sequence
  Synthetic sequence
gaagcuggacugcgaggccc

SEQ ID NO: 3082 - RNA, 20 nt, Artificial Sequence
  Synthetic sequence
gaagucccuccuagggucua

SEQ ID NO: 3083 - RNA, 20 nt, Artificial Sequence
  Synthetic sequence
gacaagguggggaagcugga

SEQ ID NO: 3084 - RNA, 20 nt, Artificial Sequence
  Synthetic sequence
gacaggcggcgggcaggugg

SEQ ID NO: 3085 - RNA, 20 nt, Artificial Sequence
  Synthetic sequence
gacccuaggagggacuuccc

SEQ ID NO: 3086 - RNA, 20 nt, Artificial Sequence
  Synthetic sequence
gacugcagcaacaggcaccg

SEQ ID NO: 3087 - RNA, 20 nt, Artificial Sequence
  Synthetic sequence
gacugcgaggcccugcccac

SEQ ID NO: 3088 - RNA, 20 nt, Artificial Sequence
  Synthetic sequence
gacuucccaacccugacagg

SEQ ID NO: 3089 - RNA, 20 nt, Artificial Sequence
  Synthetic sequence
gagcagagggacacccaggg

SEQ ID NO: 3090 - RNA, 20 nt, Artificial Sequence
  Synthetic sequence
gagcggguggggagcagagg

SEQ ID NO: 3091 - RNA, 20 nt, Artificial Sequence
  Synthetic sequence
gaggcagacaagguggggaa

SEQ ID NO: 3092 - RNA, 20 nt, Artificial Sequence
  Synthetic sequence
gagggacuucccaacccuga

SEQ ID NO: 3093 - RNA, 20 nt, Artificial Sequence
  Synthetic sequence
gcaacaggcaccguggcuag

SEQ ID NO: 3094 - RNA, 20 nt, Artificial Sequence
  Synthetic sequence
gcaccguggcuagacccuag

SEQ ID NO: 3095 - RNA, 20 nt, Artificial Sequence
  Synthetic sequence
gcagacaagguggggaagcu

SEQ ID NO: 3096 - RNA, 20 nt, Artificial Sequence
  Synthetic sequence
gcagagggacacccagggca

SEQ ID NO: 3097 - RNA, 20 nt, Artificial Sequence
  Synthetic sequence
gcagcaacaggcaccguggc

SEQ ID NO: 3098 - RNA, 20 nt, Artificial Sequence
  Synthetic sequence
gcagggccucgcaguccagc

SEQ ID NO: 3099 - RNA, 20 nt, Artificial Sequence
  Synthetic sequence
gcaggugggcagggccucgc

SEQ ID NO: 3100 - RNA, 20 nt, Artificial Sequence
  Synthetic sequence
gcaguccagcuuccccaccu

SEQ ID NO: 3101 - RNA, 20 nt, Artificial Sequence
  Synthetic sequence
gcaguccgggcugggagcgg

SEQ ID NO: 3102 - RNA, 20 nt, Artificial Sequence
  Synthetic sequence
gccacggugccuguugcugc

SEQ ID NO: 3103 - RNA, 20 nt, Artificial Sequence
  Synthetic sequence
gcccaccugcccgccgccug

SEQ ID NO: 3104 - RNA, 20 nt, Artificial Sequence
  Synthetic sequence
gcccgccgccugucaggguu

SEQ ID NO: 3105 - RNA, 20 nt, Artificial Sequence
  Synthetic sequence
gcccggacugcagcaacagg

SEQ ID NO: 3106 - RNA, 20 nt, Artificial Sequence
  Synthetic sequence
gcccugggugucccucugcu

SEQ ID NO: 3107 - RNA, 20 nt, Artificial Sequence
  Synthetic sequence
gccgccugucaggguuggga

SEQ ID NO: 3108 - RNA, 20 nt, Artificial Sequence
  Synthetic sequence
gccucgcaguccagcuuccc

SEQ ID NO: 3109 - RNA, 20 nt, Artificial Sequence
  Synthetic sequence
gccugucaggguugggaagu

SEQ ID NO: 3110 - RNA, 20 nt, Artificial Sequence
  Synthetic sequence
gccuguugcugcaguccggg

SEQ ID NO: 3111 - RNA, 20 nt, Artificial Sequence
  Synthetic sequence
gcggguggggagcagaggga

SEQ ID NO: 3112 - RNA, 20 nt, Artificial Sequence
  Synthetic sequence
gcuagacccuaggagggacu

SEQ ID NO: 3113 - RNA, 20 nt, Artificial Sequence
  Synthetic sequence
gcucccagcccggacugcag

SEQ ID NO: 3114 - RNA, 20 nt, Artificial Sequence
  Synthetic sequence
gcugcaguccgggcugggag

SEQ ID NO: 3115 - RNA, 20 nt, Artificial Sequence
  Synthetic sequence
gcuggacugcgaggcccugc

SEQ ID NO: 3116 - RNA, 20 nt, Artificial Sequence
  Synthetic sequence
gcugggagcggguggggagc

SEQ ID NO: 3117 - RNA, 20 nt, Artificial Sequence
  Synthetic sequence
gcuuccccaccuugucugcc

SEQ ID NO: 3118 - RNA, 20 nt, Artificial Sequence
  Synthetic sequence
ggaagcuggacugcgaggcc

SEQ ID NO: 3119 - RNA, 20 nt, Artificial Sequence
  Synthetic sequence
ggaagucccuccuagggucu

SEQ ID NO: 3120 - RNA, 20 nt, Artificial Sequence
  Synthetic sequence
ggacugcagcaacaggcacc

SEQ ID NO: 3121 - RNA, 20 nt, Artificial Sequence
  Synthetic sequence
ggacugcgaggcccugccca

SEQ ID NO: 3122 - RNA, 20 nt, Artificial Sequence
  Synthetic sequence
ggacuucccaacccugacag

SEQ ID NO: 3123 - RNA, 20 nt, Artificial Sequence
  Synthetic sequence
ggagcagagggacacccagg

SEQ ID NO: 3124 - RNA, 20 nt, Artificial Sequence
  Synthetic sequence
ggagcggguggggagcagag

SEQ ID NO: 3125 - RNA, 20 nt, Artificial Sequence
  Synthetic sequence
ggaggcagacaaggugggga

SEQ ID NO: 3126 - RNA, 20 nt, Artificial Sequence
  Synthetic sequence
ggagggacuucccaacccug

SEQ ID NO: 3127 - RNA, 20 nt, Artificial Sequence
  Synthetic sequence
ggcaccguggcuagacccua

SEQ ID NO: 3128 - RNA, 20 nt, Artificial Sequence
  Synthetic sequence
ggcagacaagguggggaagc

SEQ ID NO: 3129 - RNA, 20 nt, Artificial Sequence
  Synthetic sequence
ggcagggccucgcaguccag

SEQ ID NO: 3130 - RNA, 20 nt, Artificial Sequence
  Synthetic sequence
ggcaggugggcagggccucg

SEQ ID NO: 3131 - RNA, 20 nt, Artificial Sequence
  Synthetic sequence
ggccucgcaguccagcuucc

SEQ ID NO: 3132 - RNA, 20 nt, Artificial Sequence
  Synthetic sequence
ggcuagacccuaggagggac

SEQ ID NO: 3133 - RNA, 20 nt, Artificial Sequence
  Synthetic sequence
ggcugggagcggguggggag

SEQ ID NO: 3134 - RNA, 20 nt, Artificial Sequence
  Synthetic sequence
gggaagcuggacugcgaggc

SEQ ID NO: 3135 - RNA, 20 nt, Artificial Sequence
  Synthetic sequence
gggaagucccuccuaggguc

SEQ ID NO: 3136 - RNA, 20 nt, Artificial Sequence
  Synthetic sequence
gggacuucccaacccugaca

SEQ ID NO: 3137 - RNA, 20 nt, Artificial Sequence
  Synthetic sequence
gggagcagagggacacccag

SEQ ID NO: 3138 - RNA, 20 nt, Artificial Sequence
  Synthetic sequence
gggagcggguggggagcaga

SEQ ID NO: 3139 - RNA, 20 nt, Artificial Sequence
  Synthetic sequence
gggcagggccucgcagucca

SEQ ID NO: 3140 - RNA, 20 nt, Artificial Sequence
  Synthetic sequence
gggcaggugggcagggccuc

SEQ ID NO: 3141 - RNA, 20 nt, Artificial Sequence
  Synthetic sequence
gggccucgcaguccagcuuc

SEQ ID NO: 3142 - RNA, 20 nt, Artificial Sequence
  Synthetic sequence
gggcugggagcgggugggga

SEQ ID NO: 3143 - RNA, 20 nt, Artificial Sequence
  Synthetic sequence
ggggaagcuggacugcgagg

SEQ ID NO: 3144 - RNA, 20 nt, Artificial Sequence
  Synthetic sequence
ggggagcagagggacaccca

SEQ ID NO: 3145 - RNA, 20 nt, Artificial Sequence
  Synthetic sequence
gggucuagccacggugccug

SEQ ID NO: 3146 - RNA, 20 nt, Artificial Sequence
  Synthetic sequence
ggguggggagcagagggaca

SEQ ID NO: 3147 - RNA, 20 nt, Artificial Sequence
  Synthetic sequence
gggugucccucugcucccca

SEQ ID NO: 3148 - RNA, 20 nt, Artificial Sequence
  Synthetic sequence
ggguugggaagucccuccua

SEQ ID NO: 3149 - RNA, 20 nt, Artificial Sequence
  Synthetic sequence
ggucuagccacggugccugu

SEQ ID NO: 3150 - RNA, 20 nt, Artificial Sequence
  Synthetic sequence
ggugccuguugcugcagucc

SEQ ID NO: 3151 - RNA, 20 nt, Artificial Sequence
  Synthetic sequence
ggugggcagggccucgcagu

SEQ ID NO: 3152 - RNA, 20 nt, Artificial Sequence
  Synthetic sequence
gguggggaagcuggacugcg

SEQ ID NO: 3153 - RNA, 20 nt, Artificial Sequence
  Synthetic sequence
gguggggagcagagggacac

SEQ ID NO: 3154 - RNA, 20 nt, Artificial Sequence
  Synthetic sequence
ggugucccucugcuccccac

SEQ ID NO: 3155 - RNA, 20 nt, Artificial Sequence
  Synthetic sequence
gguugggaagucccuccuag

SEQ ID NO: 3156 - RNA, 20 nt, Artificial Sequence
  Synthetic sequence
guacgugcccuggguguccc

SEQ ID NO: 3157 - RNA, 20 nt, Artificial Sequence
  Synthetic sequence
gucaggguugggaagucccu

SEQ ID NO: 3158 - RNA, 20 nt, Artificial Sequence
  Synthetic sequence
guccagcuuccccaccuugu

SEQ ID NO: 3159 - RNA, 20 nt, Artificial Sequence
  Synthetic sequence
gucccuccuagggucuagcc

SEQ ID NO: 3160 - RNA, 20 nt, Artificial Sequence
  Synthetic sequence
gucccucugcuccccacccg

SEQ ID NO: 3161 - RNA, 20 nt, Artificial Sequence
  Synthetic sequence
guccgggcugggagcgggug

SEQ ID NO: 3162 - RNA, 20 nt, Artificial Sequence
  Synthetic sequence
gucuagccacggugccuguu

SEQ ID NO: 3163 - RNA, 20 nt, Artificial Sequence
  Synthetic sequence
gugcccugggugucccucug

SEQ ID NO: 3164 - RNA, 20 nt, Artificial Sequence
  Synthetic sequence
gugccuguugcugcaguccg

SEQ ID NO: 3165 - RNA, 20 nt, Artificial Sequence
  Synthetic sequence
guggaggcagacaagguggg

SEQ ID NO: 3166 - RNA, 20 nt, Artificial Sequence
  Synthetic sequence
guggcuagacccuaggaggg

SEQ ID NO: 3167 - RNA, 20 nt, Artificial Sequence
  Synthetic sequence
gugggcagggccucgcaguc

SEQ ID NO: 3168 - RNA, 20 nt, Artificial Sequence
  Synthetic sequence
guggggaagcuggacugcga

SEQ ID NO: 3169 - RNA, 20 nt, Artificial Sequence
  Synthetic sequence
guggggagcagagggacacc

SEQ ID NO: 3170 - RNA, 20 nt, Artificial Sequence
  Synthetic sequence
gugucccucugcuccccacc

SEQ ID NO: 3171 - RNA, 20 nt, Artificial Sequence
  Synthetic sequence
guugcugcaguccgggcugg

SEQ ID NO: 3172 - RNA, 20 nt, Artificial Sequence
  Synthetic sequence
guugggaagucccuccuagg

SEQ ID NO: 3173 - RNA, 20 nt, Artificial Sequence
  Synthetic sequence
uacgugcccugggugucccu

SEQ ID NO: 3174 - RNA, 20 nt, Artificial Sequence
  Synthetic sequence
uagacccuaggagggacuuc

SEQ ID NO: 3175 - RNA, 20 nt, Artificial Sequence
  Synthetic sequence
uagccacggugccuguugcu

SEQ ID NO: 3176 - RNA, 20 nt, Artificial Sequence
  Synthetic sequence
uaggagggacuucccaaccc

SEQ ID NO: 3177 - RNA, 20 nt, Artificial Sequence
  Synthetic sequence
uagggucuagccacggugcc

SEQ ID NO: 3178 - RNA, 20 nt, Artificial Sequence
  Synthetic sequence
ucaggguugggaagucccuc

SEQ ID NO: 3179 - RNA, 20 nt, Artificial Sequence
  Synthetic sequence
uccagcuuccccaccuuguc

SEQ ID NO: 3180 - RNA, 20 nt, Artificial Sequence
  Synthetic sequence
ucccaacccugacaggcggc

SEQ ID NO: 3181 - RNA, 20 nt, Artificial Sequence
  Synthetic sequence
ucccagcccggacugcagca

SEQ ID NO: 3182 - RNA, 20 nt, Artificial Sequence
  Synthetic sequence
uccccacccgcucccagccc

SEQ ID NO: 3183 - RNA, 20 nt, Artificial Sequence
  Synthetic sequence
uccccaccuugucugccucc

SEQ ID NO: 3184 - RNA, 20 nt, Artificial Sequence
  Synthetic sequence
ucccuccuagggucuagcca

SEQ ID NO: 3185 - RNA, 20 nt, Artificial Sequence
  Synthetic sequence
ucccucugcuccccacccgc

SEQ ID NO: 3186 - RNA, 20 nt, Artificial Sequence
  Synthetic sequence
uccgggcugggagcgggugg

SEQ ID NO: 3187 - RNA, 20 nt, Artificial Sequence
  Synthetic sequence
uccuagggucuagccacggu

SEQ ID NO: 3188 - RNA, 20 nt, Artificial Sequence
  Synthetic sequence
ucgcaguccagcuuccccac

SEQ ID NO: 3189 - RNA, 20 nt, Artificial Sequence
  Synthetic sequence
ucuagccacggugccuguug

SEQ ID NO: 3190 - RNA, 20 nt, Artificial Sequence
  Synthetic sequence
ucugcuccccacccgcuccc

SEQ ID NO: 3191 - RNA, 20 nt, Artificial Sequence
  Synthetic sequence
ugacaggcggcgggcaggug

SEQ ID NO: 3192 - RNA, 20 nt, Artificial Sequence
  Synthetic sequence
ugcagcaacaggcaccgugg

SEQ ID NO: 3193 - RNA, 20 nt, Artificial Sequence
  Synthetic sequence
ugcaguccgggcugggagcg

SEQ ID NO: 3194 - RNA, 20 nt, Artificial Sequence
  Synthetic sequence
ugcccaccugcccgccgccu

SEQ ID NO: 3195 - RNA, 20 nt, Artificial Sequence
  Synthetic sequence
ugcccgccgccugucagggu

SEQ ID NO: 3196 - RNA, 20 nt, Artificial Sequence
  Synthetic sequence
ugcccugggugucccucugc

SEQ ID NO: 3197 - RNA, 20 nt, Artificial Sequence
  Synthetic sequence
ugccuguugcugcaguccgg

SEQ ID NO: 3198 - RNA, 20 nt, Artificial Sequence
  Synthetic sequence
ugcgaggcccugcccaccug

SEQ ID NO: 3199 - RNA, 20 nt, Artificial Sequence
  Synthetic sequence
ugcuccccacccgcucccag

SEQ ID NO: 3200 - RNA, 20 nt, Artificial Sequence
  Synthetic sequence
ugcugcaguccgggcuggga

SEQ ID NO: 3201 - RNA, 20 nt, Artificial Sequence
  Synthetic sequence
uggacugcgaggcccugccc

SEQ ID NO: 3202 - RNA, 20 nt, Artificial Sequence
  Synthetic sequence
uggaggcagacaaggugggg

SEQ ID NO: 3203 - RNA, 20 nt, Artificial Sequence
  Synthetic sequence
uggcuagacccuaggaggga

SEQ ID NO: 3204 - RNA, 20 nt, Artificial Sequence
  Synthetic sequence
ugggaagucccuccuagggu

SEQ ID NO: 3205 - RNA, 20 nt, Artificial Sequence
  Synthetic sequence
ugggagcggguggggagcag

SEQ ID NO: 3206 - RNA, 20 nt, Artificial Sequence
  Synthetic sequence
ugggcagggccucgcagucc

SEQ ID NO: 3207 - RNA, 20 nt, Artificial Sequence
  Synthetic sequence
uggggaagcuggacugcgag

SEQ ID NO: 3208 - RNA, 20 nt, Artificial Sequence
  Synthetic sequence
uggggagcagagggacaccc

SEQ ID NO: 3209 - RNA, 20 nt, Artificial Sequence
  Synthetic sequence
ugggugucccucugcucccc

SEQ ID NO: 3210 - RNA, 20 nt, Artificial Sequence
  Synthetic sequence
ugucaggguugggaaguccc

SEQ ID NO: 3211 - RNA, 20 nt, Artificial Sequence
  Synthetic sequence
ugucccucugcuccccaccc

SEQ ID NO: 3212 - RNA, 20 nt, Artificial Sequence
  Synthetic sequence
uguggaggcagacaaggugg

SEQ ID NO: 3213 - RNA, 20 nt, Artificial Sequence
  Synthetic sequence
uguugcugcaguccgggcug

SEQ ID NO: 3214 - RNA, 20 nt, Artificial Sequence
  Synthetic sequence
uucccaacccugacaggcgg

SEQ ID NO: 3215 - RNA, 20 nt, Artificial Sequence
  Synthetic sequence
uuccccaccuugucugccuc

SEQ ID NO: 3216 - RNA, 20 nt, Artificial Sequence
  Synthetic sequence
uugcugcaguccgggcuggg

SEQ ID NO: 3217 - RNA, 20 nt, Artificial Sequence
  Synthetic sequence
uugggaagucccuccuaggg

SEQ ID NO: 3218 - RNA, 21 nt, Artificial Sequence
  Synthetic sequence
aacaggcaccguggcuagacc

SEQ ID NO: 3219 - RNA, 21 nt, Artificial Sequence
  Synthetic sequence
aacccugacaggcggcgggca

SEQ ID NO: 3220 - RNA, 21 nt, Artificial Sequence
  Synthetic sequence
aagcuggacugcgaggcccug

SEQ ID NO: 3221 - RNA, 21 nt, Artificial Sequence
  Synthetic sequence
aagguggggaagcuggacugc

SEQ ID NO: 3222 - RNA, 21 nt, Artificial Sequence
  Synthetic sequence
aagucccuccuagggucuagc

SEQ ID NO: 3223 - RNA, 21 nt, Artificial Sequence
  Synthetic sequence
acaagguggggaagcuggacu

SEQ ID NO: 3224 - RNA, 21 nt, Artificial Sequence
  Synthetic sequence
acaggcaccguggcuagaccc

SEQ ID NO: 3225 - RNA, 21 nt, Artificial Sequence
  Synthetic sequence
acaggcggcgggcaggugggc

SEQ ID NO: 3226 - RNA, 21 nt, Artificial Sequence
  Synthetic sequence
acccgcucccagcccggacug

SEQ ID NO: 3227 - RNA, 21 nt, Artificial Sequence
  Synthetic sequence
acccuaggagggacuucccaa

SEQ ID NO: 3228 - RNA, 21 nt, Artificial Sequence
  Synthetic sequence
acccugacaggcggcgggcag

SEQ ID NO: 3229 - RNA, 21 nt, Artificial Sequence
  Synthetic sequence
accguggcuagacccuaggag

SEQ ID NO: 3230 - RNA, 21 nt, Artificial Sequence
  Synthetic sequence
accugcccgccgccugucagg

SEQ ID NO: 3231 - RNA, 21 nt, Artificial Sequence
  Synthetic sequence
acggugccuguugcugcaguc

SEQ ID NO: 3232 - RNA, 21 nt, Artificial Sequence
  Synthetic sequence
acgugcccugggugucccucu

SEQ ID NO: 3233 - RNA, 21 nt, Artificial Sequence
  Synthetic sequence
acugcagcaacaggcaccgug

SEQ ID NO: 3234 - RNA, 21 nt, Artificial Sequence
  Synthetic sequence
acugcgaggcccugcccaccu

SEQ ID NO: 3235 - RNA, 21 nt, Artificial Sequence
  Synthetic sequence
acuucccaacccugacaggcg

SEQ ID NO: 3236 - RNA, 21 nt, Artificial Sequence
  Synthetic sequence
agacaagguggggaagcugga

SEQ ID NO: 3237 - RNA, 21 nt, Artificial Sequence
  Synthetic sequence
agacccuaggagggacuuccc

SEQ ID NO: 3238 - RNA, 21 nt, Artificial Sequence
  Synthetic sequence
agcaacaggcaccguggcuag

SEQ ID NO: 3239 - RNA, 21 nt, Artificial Sequence
  Synthetic sequence
agcagagggacacccagggca

SEQ ID NO: 3240 - RNA, 21 nt, Artificial Sequence
  Synthetic sequence
agccacggugccuguugcugc

SEQ ID NO: 3241 - RNA, 21 nt, Artificial Sequence
  Synthetic sequence
agcccggacugcagcaacagg

SEQ ID NO: 3242 - RNA, 21 nt, Artificial Sequence
  Synthetic sequence
agcggguggggagcagaggga

SEQ ID NO: 3243 - RNA, 21 nt, Artificial Sequence
  Synthetic sequence
agcuggacugcgaggcccugc

SEQ ID NO: 3244 - RNA, 21 nt, Artificial Sequence
  Synthetic sequence
agcuuccccaccuugucugcc

SEQ ID NO: 3245 - RNA, 21 nt, Artificial Sequence
  Synthetic sequence
aggagggacuucccaacccug

SEQ ID NO: 3246 - RNA, 21 nt, Artificial Sequence
  Synthetic sequence
aggcaccguggcuagacccua

SEQ ID NO: 3247 - RNA, 21 nt, Artificial Sequence
  Synthetic sequence
aggcagacaagguggggaagc

SEQ ID NO: 3248 - RNA, 21 nt, Artificial Sequence
  Synthetic sequence
agggacuucccaacccugaca

SEQ ID NO: 3249 - RNA, 21 nt, Artificial Sequence
  Synthetic sequence
agggccucgcaguccagcuuc

SEQ ID NO: 3250 - RNA, 21 nt, Artificial Sequence
  Synthetic sequence
agggucuagccacggugccug

SEQ ID NO: 3251 - RNA, 21 nt, Artificial Sequence
  Synthetic sequence
aggguugggaagucccuccua

SEQ ID NO: 3252 - RNA, 21 nt, Artificial Sequence
  Synthetic sequence
aggugggcagggccucgcagu

SEQ ID NO: 3253 - RNA, 21 nt, Artificial Sequence
  Synthetic sequence
agguggggaagcuggacugcg

SEQ ID NO: 3254 - RNA, 21 nt, Artificial Sequence
  Synthetic sequence
aguccagcuuccccaccuugu

SEQ ID NO: 3255 - RNA, 21 nt, Artificial Sequence
  Synthetic sequence
agucccuccuagggucuagcc

SEQ ID NO: 3256 - RNA, 21 nt, Artificial Sequence
  Synthetic sequence
aguccgggcugggagcgggug

SEQ ID NO: 3257 - RNA, 21 nt, Artificial Sequence
  Synthetic sequence
caacaggcaccguggcuagac

SEQ ID NO: 3258 - RNA, 21 nt, Artificial Sequence
  Synthetic sequence
caacccugacaggcggcgggc

SEQ ID NO: 3259 - RNA, 21 nt, Artificial Sequence
  Synthetic sequence
caagguggggaagcuggacug

SEQ ID NO: 3260 - RNA, 21 nt, Artificial Sequence
  Synthetic sequence
cacccgcucccagcccggacu

SEQ ID NO: 3261 - RNA, 21 nt, Artificial Sequence
  Synthetic sequence
caccguggcuagacccuagga

SEQ ID NO: 3262 - RNA, 21 nt, Artificial Sequence
  Synthetic sequence
caccugcccgccgccugucag

SEQ ID NO: 3263 - RNA, 21 nt, Artificial Sequence
  Synthetic sequence
cacggugccuguugcugcagu

SEQ ID NO: 3264 - RNA, 21 nt, Artificial Sequence
  Synthetic sequence
cagacaagguggggaagcugg

SEQ ID NO: 3265 - RNA, 21 nt, Artificial Sequence
  Synthetic sequence
cagcaacaggcaccguggcua

SEQ ID NO: 3266 - RNA, 21 nt, Artificial Sequence
  Synthetic sequence
cagcccggacugcagcaacag

SEQ ID NO: 3267 - RNA, 21 nt, Artificial Sequence
  Synthetic sequence
cagcuuccccaccuugucugc

SEQ ID NO: 3268 - RNA, 21 nt, Artificial Sequence
  Synthetic sequence
caggcaccguggcuagacccu

SEQ ID NO: 3269 - RNA, 21 nt, Artificial Sequence
  Synthetic sequence
cagggccucgcaguccagcuu

SEQ ID NO: 3270 - RNA, 21 nt, Artificial Sequence
  Synthetic sequence
caggguugggaagucccuccu

SEQ ID NO: 3271 - RNA, 21 nt, Artificial Sequence
  Synthetic sequence
caggugggcagggccucgcag

SEQ ID NO: 3272 - RNA, 21 nt, Artificial Sequence
  Synthetic sequence
caguccagcuuccccaccuug

SEQ ID NO: 3273 - RNA, 21 nt, Artificial Sequence
  Synthetic sequence
caguccgggcugggagcgggu

SEQ ID NO: 3274 - RNA, 21 nt, Artificial Sequence
  Synthetic sequence
ccaacccugacaggcggcggg

SEQ ID NO: 3275 - RNA, 21 nt, Artificial Sequence
  Synthetic sequence
ccacccgcucccagcccggac

SEQ ID NO: 3276 - RNA, 21 nt, Artificial Sequence
  Synthetic sequence
ccaccugcccgccgccuguca

SEQ ID NO: 3277 - RNA, 21 nt, Artificial Sequence
  Synthetic sequence
ccacggugccuguugcugcag

SEQ ID NO: 3278 - RNA, 21 nt, Artificial Sequence
  Synthetic sequence
ccagcccggacugcagcaaca

SEQ ID NO: 3279 - RNA, 21 nt, Artificial Sequence
  Synthetic sequence
ccagcuuccccaccuugucug

SEQ ID NO: 3280 - RNA, 21 nt, Artificial Sequence
  Synthetic sequence
cccaacccugacaggcggcgg

SEQ ID NO: 3281 - RNA, 21 nt, Artificial Sequence
  Synthetic sequence
cccacccgcucccagcccgga

SEQ ID NO: 3282 - RNA, 21 nt, Artificial Sequence
  Synthetic sequence
cccaccugcccgccgccuguc

SEQ ID NO: 3283 - RNA, 21 nt, Artificial Sequence
  Synthetic sequence
cccagcccggacugcagcaac

SEQ ID NO: 3284 - RNA, 21 nt, Artificial Sequence
  Synthetic sequence
ccccacccgcucccagcccgg

SEQ ID NO: 3285 - RNA, 21 nt, Artificial Sequence
  Synthetic sequence
cccgccgccugucaggguugg

SEQ ID NO: 3286 - RNA, 21 nt, Artificial Sequence
  Synthetic sequence
cccgcucccagcccggacugc

SEQ ID NO: 3287 - RNA, 21 nt, Artificial Sequence
  Synthetic sequence
cccggacugcagcaacaggca

SEQ ID NO: 3288 - RNA, 21 nt, Artificial Sequence
  Synthetic sequence
cccuaggagggacuucccaac

SEQ ID NO: 3289 - RNA, 21 nt, Artificial Sequence
  Synthetic sequence
cccuccuagggucuagccacg

SEQ ID NO: 3290 - RNA, 21 nt, Artificial Sequence
  Synthetic sequence
cccucugcuccccacccgcuc

SEQ ID NO: 3291 - RNA, 21 nt, Artificial Sequence
  Synthetic sequence
cccugacaggcggcgggcagg

SEQ ID NO: 3292 - RNA, 21 nt, Artificial Sequence
  Synthetic sequence
cccugcccaccugcccgccgc

SEQ ID NO: 3293 - RNA, 21 nt, Artificial Sequence
  Synthetic sequence
cccugggugucccucugcucc

SEQ ID NO: 3294 - RNA, 21 nt, Artificial Sequence
  Synthetic sequence
ccgccgccugucaggguuggg

SEQ ID NO: 3295 - RNA, 21 nt, Artificial Sequence
  Synthetic sequence
ccgccugucaggguugggaag

SEQ ID NO: 3296 - RNA, 21 nt, Artificial Sequence
  Synthetic sequence
ccgcucccagcccggacugca

SEQ ID NO: 3297 - RNA, 21 nt, Artificial Sequence
  Synthetic sequence
ccggacugcagcaacaggcac

SEQ ID NO: 3298 - RNA, 21 nt, Artificial Sequence
  Synthetic sequence
ccgggcugggagcgggugggg

SEQ ID NO: 3299 - RNA, 21 nt, Artificial Sequence
  Synthetic sequence
ccguggcuagacccuaggagg

SEQ ID NO: 3300 - RNA, 21 nt, Artificial Sequence
  Synthetic sequence
ccuaggagggacuucccaacc

SEQ ID NO: 3301 - RNA, 21 nt, Artificial Sequence
  Synthetic sequence
ccuagggucuagccacggugc

SEQ ID NO: 3302 - RNA, 21 nt, Artificial Sequence
  Synthetic sequence
ccuccuagggucuagccacgg

SEQ ID NO: 3303 - RNA, 21 nt, Artificial Sequence
  Synthetic sequence
ccucgcaguccagcuucccca

SEQ ID NO: 3304 - RNA, 21 nt, Artificial Sequence
  Synthetic sequence
ccucugcuccccacccgcucc

SEQ ID NO: 3305 - RNA, 21 nt, Artificial Sequence
  Synthetic sequence
ccugacaggcggcgggcaggu

SEQ ID NO: 3306 - RNA, 21 nt, Artificial Sequence
  Synthetic sequence
ccugcccaccugcccgccgcc

SEQ ID NO: 3307 - RNA, 21 nt, Artificial Sequence
  Synthetic sequence
ccugcccgccgccugucaggg

SEQ ID NO: 3308 - RNA, 21 nt, Artificial Sequence
  Synthetic sequence
ccugggugucccucugcuccc

SEQ ID NO: 3309 - RNA, 21 nt, Artificial Sequence
  Synthetic sequence
ccugucaggguugggaagucc

SEQ ID NO: 3310 - RNA, 21 nt, Artificial Sequence
  Synthetic sequence
ccuguugcugcaguccgggcu

SEQ ID NO: 3311 - RNA, 21 nt, Artificial Sequence
  Synthetic sequence
cgcaguccagcuuccccaccu

SEQ ID NO: 3312 - RNA, 21 nt, Artificial Sequence
  Synthetic sequence
cgccgccugucaggguuggga

SEQ ID NO: 3313 - RNA, 21 nt, Artificial Sequence
  Synthetic sequence
cgccugucaggguugggaagu

SEQ ID NO: 3314 - RNA, 21 nt, Artificial Sequence
  Synthetic sequence
cgcucccagcccggacugcag

SEQ ID NO: 3315 - RNA, 21 nt, Artificial Sequence
  Synthetic sequence
cggacugcagcaacaggcacc

SEQ ID NO: 3316 - RNA, 21 nt, Artificial Sequence
  Synthetic sequence
cgggcaggugggcagggccuc

SEQ ID NO: 3317 - RNA, 21 nt, Artificial Sequence
  Synthetic sequence
cgggcugggagcgggugggga

SEQ ID NO: 3318 - RNA, 21 nt, Artificial Sequence
  Synthetic sequence
cggguggggagcagagggaca

SEQ ID NO: 3319 - RNA, 21 nt, Artificial Sequence
  Synthetic sequence
cggugccuguugcugcagucc

SEQ ID NO: 3320 - RNA, 21 nt, Artificial Sequence
  Synthetic sequence
cgugcccugggugucccucug

SEQ ID NO: 3321 - RNA, 21 nt, Artificial Sequence
  Synthetic sequence
cguggcuagacccuaggaggg

SEQ ID NO: 3322 - RNA, 21 nt, Artificial Sequence
  Synthetic sequence
cuagacccuaggagggacuuc

SEQ ID NO: 3323 - RNA, 21 nt, Artificial Sequence
  Synthetic sequence
cuagccacggugccuguugcu

SEQ ID NO: 3324 - RNA, 21 nt, Artificial Sequence
  Synthetic sequence
cuaggagggacuucccaaccc

SEQ ID NO: 3325 - RNA, 21 nt, Artificial Sequence
  Synthetic sequence
cuagggucuagccacggugcc

SEQ ID NO: 3326 - RNA, 21 nt, Artificial Sequence
  Synthetic sequence
cucccagcccggacugcagca

SEQ ID NO: 3327 - RNA, 21 nt, Artificial Sequence
  Synthetic sequence
cuccccacccgcucccagccc

SEQ ID NO: 3328 - RNA, 21 nt, Artificial Sequence
  Synthetic sequence
cuccuagggucuagccacggu

SEQ ID NO: 3329 - RNA, 21 nt, Artificial Sequence
  Synthetic sequence
cucgcaguccagcuuccccac

SEQ ID NO: 3330 - RNA, 21 nt, Artificial Sequence
  Synthetic sequence
cucugcuccccacccgcuccc

SEQ ID NO: 3331 - RNA, 21 nt, Artificial Sequence
  Synthetic sequence
cugacaggcggcgggcaggug

SEQ ID NO: 3332 - RNA, 21 nt, Artificial Sequence
  Synthetic sequence
cugcagcaacaggcaccgugg

SEQ ID NO: 3333 - RNA, 21 nt, Artificial Sequence
  Synthetic sequence
cugcaguccgggcugggagcg

SEQ ID NO: 3334 - RNA, 21 nt, Artificial Sequence
  Synthetic sequence
cugcccaccugcccgccgccu

SEQ ID NO: 3335 - RNA, 21 nt, Artificial Sequence
  Synthetic sequence
cugcccgccgccugucagggu

SEQ ID NO: 3336 - RNA, 21 nt, Artificial Sequence
  Synthetic sequence
cugcgaggcccugcccaccug

SEQ ID NO: 3337 - RNA, 21 nt, Artificial Sequence
  Synthetic sequence
cugcuccccacccgcucccag

SEQ ID NO: 3338 - RNA, 21 nt, Artificial Sequence
  Synthetic sequence
cuggacugcgaggcccugccc

SEQ ID NO: 3339 - RNA, 21 nt, Artificial Sequence
  Synthetic sequence
cugggagcggguggggagcag

SEQ ID NO: 3340 - RNA, 21 nt, Artificial Sequence
  Synthetic sequence
cugggugucccucugcucccc

SEQ ID NO: 3341 - RNA, 21 nt, Artificial Sequence
  Synthetic sequence
cugucaggguugggaaguccc

SEQ ID NO: 3342 - RNA, 21 nt, Artificial Sequence
  Synthetic sequence
cuguggaggcagacaaggugg

SEQ ID NO: 3343 - RNA, 21 nt, Artificial Sequence
  Synthetic sequence
cuguugcugcaguccgggcug

SEQ ID NO: 3344 - RNA, 21 nt, Artificial Sequence
  Synthetic sequence
cuucccaacccugacaggcgg

SEQ ID NO: 3345 - RNA, 21 nt, Artificial Sequence
  Synthetic sequence
cuuccccaccuugucugccuc

SEQ ID NO: 3346 - RNA, 21 nt, Artificial Sequence
  Synthetic sequence
gaagcuggacugcgaggcccu

SEQ ID NO: 3347 - RNA, 21 nt, Artificial Sequence
  Synthetic sequence
gaagucccuccuagggucuag

SEQ ID NO: 3348 - RNA, 21 nt, Artificial Sequence
  Synthetic sequence
gacaagguggggaagcuggac

SEQ ID NO: 3349 - RNA, 21 nt, Artificial Sequence
  Synthetic sequence
gacaggcggcgggcagguggg

SEQ ID NO: 3350 - RNA, 21 nt, Artificial Sequence
  Synthetic sequence
gacccuaggagggacuuccca

SEQ ID NO: 3351 - RNA, 21 nt, Artificial Sequence
  Synthetic sequence
gacugcagcaacaggcaccgu

SEQ ID NO: 3352 - RNA, 21 nt, Artificial Sequence
  Synthetic sequence
gacugcgaggcccugcccacc

SEQ ID NO: 3353 - RNA, 21 nt, Artificial Sequence
  Synthetic sequence
gacuucccaacccugacaggc

SEQ ID NO: 3354 - RNA, 21 nt, Artificial Sequence
  Synthetic sequence
gagcagagggacacccagggc

SEQ ID NO: 3355 - RNA, 21 nt, Artificial Sequence
  Synthetic sequence
gagcggguggggagcagaggg

SEQ ID NO: 3356 - RNA, 21 nt, Artificial Sequence
  Synthetic sequence
gaggcagacaagguggggaag

SEQ ID NO: 3357 - RNA, 21 nt, Artificial Sequence
  Synthetic sequence
gagggacuucccaacccugac

SEQ ID NO: 3358 - RNA, 21 nt, Artificial Sequence
  Synthetic sequence
gcaacaggcaccguggcuaga

SEQ ID NO: 3359 - RNA, 21 nt, Artificial Sequence
  Synthetic sequence
gcaccguggcuagacccuagg

SEQ ID NO: 3360 - RNA, 21 nt, Artificial Sequence
  Synthetic sequence
gcagacaagguggggaagcug

SEQ ID NO: 3361 - RNA, 21 nt, Artificial Sequence
  Synthetic sequence
gcagagggacacccagggcac

SEQ ID NO: 3362 - RNA, 21 nt, Artificial Sequence
  Synthetic sequence
gcagcaacaggcaccguggcu

SEQ ID NO: 3363 - RNA, 21 nt, Artificial Sequence
  Synthetic sequence
gcagggccucgcaguccagcu

SEQ ID NO: 3364 - RNA, 21 nt, Artificial Sequence
  Synthetic sequence
gcaggugggcagggccucgca

SEQ ID NO: 3365 - RNA, 21 nt, Artificial Sequence
  Synthetic sequence
gcaguccagcuuccccaccuu

SEQ ID NO: 3366 - RNA, 21 nt, Artificial Sequence
  Synthetic sequence
gcaguccgggcugggagcggg

SEQ ID NO: 3367 - RNA, 21 nt, Artificial Sequence
  Synthetic sequence
gccacggugccuguugcugca

SEQ ID NO: 3368 - RNA, 21 nt, Artificial Sequence
  Synthetic sequence
gcccaccugcccgccgccugu

SEQ ID NO: 3369 - RNA, 21 nt, Artificial Sequence
  Synthetic sequence
gcccgccgccugucaggguug

SEQ ID NO: 3370 - RNA, 21 nt, Artificial Sequence
  Synthetic sequence
gcccggacugcagcaacaggc

SEQ ID NO: 3371 - RNA, 21 nt, Artificial Sequence
  Synthetic sequence
gcccugggugucccucugcuc

SEQ ID NO: 3372 - RNA, 21 nt, Artificial Sequence
  Synthetic sequence
gccgccugucaggguugggaa

SEQ ID NO: 3373 - RNA, 21 nt, Artificial Sequence
  Synthetic sequence
gccucgcaguccagcuucccc

SEQ ID NO: 3374 - RNA, 21 nt, Artificial Sequence
  Synthetic sequence
gccugucaggguugggaaguc

SEQ ID NO: 3375 - RNA, 21 nt, Artificial Sequence
  Synthetic sequence
gccuguugcugcaguccgggc

SEQ ID NO: 3376 - RNA, 21 nt, Artificial Sequence
  Synthetic sequence
gcgggcaggugggcagggccu

SEQ ID NO: 3377 - RNA, 21 nt, Artificial Sequence
  Synthetic sequence
gcggguggggagcagagggac

SEQ ID NO: 3378 - RNA, 21 nt, Artificial Sequence
  Synthetic sequence
gcuagacccuaggagggacuu

SEQ ID NO: 3379 - RNA, 21 nt, Artificial Sequence
  Synthetic sequence
gcucccagcccggacugcagc

SEQ ID NO: 3380 - RNA, 21 nt, Artificial Sequence
  Synthetic sequence
gcuccccacccgcucccagcc

SEQ ID NO: 3381 - RNA, 21 nt, Artificial Sequence
  Synthetic sequence
gcugcaguccgggcugggagc

SEQ ID NO: 3382 - RNA, 21 nt, Artificial Sequence
  Synthetic sequence
gcuggacugcgaggcccugcc

SEQ ID NO: 3383 - RNA, 21 nt, Artificial Sequence
  Synthetic sequence
gcugggagcggguggggagca

SEQ ID NO: 3384 - RNA, 21 nt, Artificial Sequence
  Synthetic sequence
gcuuccccaccuugucugccu

SEQ ID NO: 3385 - RNA, 21 nt, Artificial Sequence
  Synthetic sequence
ggaagcuggacugcgaggccc

SEQ ID NO: 3386 - RNA, 21 nt, Artificial Sequence
  Synthetic sequence
ggaagucccuccuagggucua

SEQ ID NO: 3387 - RNA, 21 nt, Artificial Sequence
  Synthetic sequence
ggacugcagcaacaggcaccg

SEQ ID NO: 3388 - RNA, 21 nt, Artificial Sequence
  Synthetic sequence
ggacugcgaggcccugcccac

SEQ ID NO: 3389 - RNA, 21 nt, Artificial Sequence
  Synthetic sequence
ggacuucccaacccugacagg

SEQ ID NO: 3390 - RNA, 21 nt, Artificial Sequence
  Synthetic sequence
ggagcagagggacacccaggg

SEQ ID NO: 3391 - RNA, 21 nt, Artificial Sequence
  Synthetic sequence
ggagcggguggggagcagagg

SEQ ID NO: 3392 - RNA, 21 nt, Artificial Sequence
  Synthetic sequence
ggaggcagacaagguggggaa

SEQ ID NO: 3393 - RNA, 21 nt, Artificial Sequence
  Synthetic sequence
ggagggacuucccaacccuga

SEQ ID NO: 3394 - RNA, 21 nt, Artificial Sequence
  Synthetic sequence
ggcaccguggcuagacccuag

SEQ ID NO: 3395 - RNA, 21 nt, Artificial Sequence
  Synthetic sequence
ggcagacaagguggggaagcu

SEQ ID NO: 3396 - RNA, 21 nt, Artificial Sequence
  Synthetic sequence
ggcagggccucgcaguccagc

SEQ ID NO: 3397 - RNA, 21 nt, Artificial Sequence
  Synthetic sequence
ggcaggugggcagggccucgc

SEQ ID NO: 3398 - RNA, 21 nt, Artificial Sequence
  Synthetic sequence
ggccucgcaguccagcuuccc

SEQ ID NO: 3399 - RNA, 21 nt, Artificial Sequence
  Synthetic sequence
ggcuagacccuaggagggacu

SEQ ID NO: 3400 - RNA, 21 nt, Artificial Sequence
  Synthetic sequence
ggcugggagcggguggggagc

SEQ ID NO: 3401 - RNA, 21 nt, Artificial Sequence
  Synthetic sequence
gggaagcuggacugcgaggcc

SEQ ID NO: 3402 - RNA, 21 nt, Artificial Sequence
  Synthetic sequence
gggaagucccuccuagggucu

SEQ ID NO: 3403 - RNA, 21 nt, Artificial Sequence
  Synthetic sequence
gggacuucccaacccugacag

SEQ ID NO: 3404 - RNA, 21 nt, Artificial Sequence
  Synthetic sequence
gggagcagagggacacccagg

SEQ ID NO: 3405 - RNA, 21 nt, Artificial Sequence
  Synthetic sequence
gggagcggguggggagcagag

SEQ ID NO: 3406 - RNA, 21 nt, Artificial Sequence
  Synthetic sequence
gggcagggccucgcaguccag

SEQ ID NO: 3407 - RNA, 21 nt, Artificial Sequence
  Synthetic sequence
gggcaggugggcagggccucg

SEQ ID NO: 3408 - RNA, 21 nt, Artificial Sequence
  Synthetic sequence
gggccucgcaguccagcuucc

SEQ ID NO: 3409 - RNA, 21 nt, Artificial Sequence
  Synthetic sequence
gggcugggagcggguggggag

SEQ ID NO: 3410 - RNA, 21 nt, Artificial Sequence
  Synthetic sequence
ggggaagcuggacugcgaggc

SEQ ID NO: 3411 - RNA, 21 nt, Artificial Sequence
  Synthetic sequence
ggggagcagagggacacccag

SEQ ID NO: 3412 - RNA, 21 nt, Artificial Sequence
  Synthetic sequence
gggucuagccacggugccugu

SEQ ID NO: 3413 - RNA, 21 nt, Artificial Sequence
  Synthetic sequence
ggguggggagcagagggacac

SEQ ID NO: 3414 - RNA, 21 nt, Artificial Sequence
  Synthetic sequence
gggugucccucugcuccccac

SEQ ID NO: 3415 - RNA, 21 nt, Artificial Sequence
  Synthetic sequence
ggguugggaagucccuccuag

SEQ ID NO: 3416 - RNA, 21 nt, Artificial Sequence
  Synthetic sequence
ggucuagccacggugccuguu

SEQ ID NO: 3417 - RNA, 21 nt, Artificial Sequence
  Synthetic sequence
ggugccuguugcugcaguccg

SEQ ID NO: 3418 - RNA, 21 nt, Artificial Sequence
  Synthetic sequence
ggugggcagggccucgcaguc

SEQ ID NO: 3419 - RNA, 21 nt, Artificial Sequence
  Synthetic sequence
gguggggaagcuggacugcga

SEQ ID NO: 3420 - RNA, 21 nt, Artificial Sequence
  Synthetic sequence
gguggggagcagagggacacc

SEQ ID NO: 3421 - RNA, 21 nt, Artificial Sequence
  Synthetic sequence
ggugucccucugcuccccacc

SEQ ID NO: 3422 - RNA, 21 nt, Artificial Sequence
  Synthetic sequence
gguugggaagucccuccuagg

SEQ ID NO: 3423 - RNA, 21 nt, Artificial Sequence
  Synthetic sequence
guacgugcccugggugucccu

SEQ ID NO: 3424 - RNA, 21 nt, Artificial Sequence
  Synthetic sequence
gucaggguugggaagucccuc

SEQ ID NO: 3425 - RNA, 21 nt, Artificial Sequence
  Synthetic sequence
guccagcuuccccaccuuguc

SEQ ID NO: 3426 - RNA, 21 nt, Artificial Sequence
  Synthetic sequence
gucccuccuagggucuagcca

SEQ ID NO: 3427 - RNA, 21 nt, Artificial Sequence
  Synthetic sequence
gucccucugcuccccacccgc

SEQ ID NO: 3428 - RNA, 21 nt, Artificial Sequence
  Synthetic sequence
guccgggcugggagcgggugg

SEQ ID NO: 3429 - RNA, 21 nt, Artificial Sequence
  Synthetic sequence
gucuagccacggugccuguug

SEQ ID NO: 3430 - RNA, 21 nt, Artificial Sequence
  Synthetic sequence
gugcccugggugucccucugc

SEQ ID NO: 3431 - RNA, 21 nt, Artificial Sequence
  Synthetic sequence
gugccuguugcugcaguccgg

SEQ ID NO: 3432 - RNA, 21 nt, Artificial Sequence
  Synthetic sequence
guggaggcagacaaggugggg

SEQ ID NO: 3433 - RNA, 21 nt, Artificial Sequence
  Synthetic sequence
guggcuagacccuaggaggga

SEQ ID NO: 3434 - RNA, 21 nt, Artificial Sequence
  Synthetic sequence
gugggcagggccucgcagucc

SEQ ID NO: 3435 - RNA, 21 nt, Artificial Sequence
  Synthetic sequence
guggggaagcuggacugcgag

SEQ ID NO: 3436 - RNA, 21 nt, Artificial Sequence
  Synthetic sequence
guggggagcagagggacaccc

SEQ ID NO: 3437 - RNA, 21 nt, Artificial Sequence
  Synthetic sequence
gugucccucugcuccccaccc

SEQ ID NO: 3438 - RNA, 21 nt, Artificial Sequence
  Synthetic sequence
guugcugcaguccgggcuggg

SEQ ID NO: 3439 - RNA, 21 nt, Artificial Sequence
  Synthetic sequence
guugggaagucccuccuaggg

SEQ ID NO: 3440 - RNA, 21 nt, Artificial Sequence
  Synthetic sequence
uacgugcccugggugucccuc

SEQ ID NO: 3441 - RNA, 21 nt, Artificial Sequence
  Synthetic sequence
uagacccuaggagggacuucc

SEQ ID NO: 3442 - RNA, 21 nt, Artificial Sequence
  Synthetic sequence
uagccacggugccuguugcug

SEQ ID NO: 3443 - RNA, 21 nt, Artificial Sequence
  Synthetic sequence
uaggagggacuucccaacccu

SEQ ID NO: 3444 - RNA, 21 nt, Artificial Sequence
  Synthetic sequence
uagggucuagccacggugccu

SEQ ID NO: 3445 - RNA, 21 nt, Artificial Sequence
  Synthetic sequence
ucaggguugggaagucccucc

SEQ ID NO: 3446 - RNA, 21 nt, Artificial Sequence
  Synthetic sequence
uccagcuuccccaccuugucu

SEQ ID NO: 3447 - RNA, 21 nt, Artificial Sequence
  Synthetic sequence
ucccaacccugacaggcggcg

SEQ ID NO: 3448 - RNA, 21 nt, Artificial Sequence
  Synthetic sequence
ucccagcccggacugcagcaa

SEQ ID NO: 3449 - RNA, 21 nt, Artificial Sequence
  Synthetic sequence
uccccacccgcucccagcccg

SEQ ID NO: 3450 - RNA, 21 nt, Artificial Sequence
  Synthetic sequence
ucccuccuagggucuagccac

SEQ ID NO: 3451 - RNA, 21 nt, Artificial Sequence
  Synthetic sequence
ucccucugcuccccacccgcu

SEQ ID NO: 3452 - RNA, 21 nt, Artificial Sequence
  Synthetic sequence
uccgggcugggagcggguggg

SEQ ID NO: 3453 - RNA, 21 nt, Artificial Sequence
  Synthetic sequence
uccuagggucuagccacggug

SEQ ID NO: 3454 - RNA, 21 nt, Artificial Sequence
  Synthetic sequence
ucgcaguccagcuuccccacc

SEQ ID NO: 3455 - RNA, 21 nt, Artificial Sequence
  Synthetic sequence
ucuagccacggugccuguugc

SEQ ID NO: 3456 - RNA, 21 nt, Artificial Sequence
  Synthetic sequence
ucugcuccccacccgcuccca

SEQ ID NO: 3457 - RNA, 21 nt, Artificial Sequence
  Synthetic sequence
ugacaggcggcgggcaggugg

SEQ ID NO: 3458 - RNA, 21 nt, Artificial Sequence
  Synthetic sequence
ugcagcaacaggcaccguggc

SEQ ID NO: 3459 - RNA, 21 nt, Artificial Sequence
  Synthetic sequence
ugcaguccgggcugggagcgg

SEQ ID NO: 3460 - RNA, 21 nt, Artificial Sequence
  Synthetic sequence
ugcccaccugcccgccgccug

SEQ ID NO: 3461 - RNA, 21 nt, Artificial Sequence
  Synthetic sequence
ugcccgccgccugucaggguu

SEQ ID NO: 3462 - RNA, 21 nt, Artificial Sequence
  Synthetic sequence
ugcccugggugucccucugcu

SEQ ID NO: 3463 - RNA, 21 nt, Artificial Sequence
  Synthetic sequence
ugccuguugcugcaguccggg

SEQ ID NO: 3464 - RNA, 21 nt, Artificial Sequence
  Synthetic sequence
ugcgaggcccugcccaccugc

SEQ ID NO: 3465 - RNA, 21 nt, Artificial Sequence
  Synthetic sequence
ugcuccccacccgcucccagc

SEQ ID NO: 3466 - RNA, 21 nt, Artificial Sequence
  Synthetic sequence
ugcugcaguccgggcugggag

SEQ ID NO: 3467 - RNA, 21 nt, Artificial Sequence
  Synthetic sequence
uggacugcgaggcccugccca

SEQ ID NO: 3468 - RNA, 21 nt, Artificial Sequence
  Synthetic sequence
uggaggcagacaaggugggga

SEQ ID NO: 3469 - RNA, 21 nt, Artificial Sequence
  Synthetic sequence
uggcuagacccuaggagggac

SEQ ID NO: 3470 - RNA, 21 nt, Artificial Sequence
  Synthetic sequence
ugggaagucccuccuaggguc

SEQ ID NO: 3471 - RNA, 21 nt, Artificial Sequence
  Synthetic sequence
ugggagcggguggggagcaga

SEQ ID NO: 3472 - RNA, 21 nt, Artificial Sequence
  Synthetic sequence
ugggcagggccucgcagucca

SEQ ID NO: 3473 - RNA, 21 nt, Artificial Sequence
  Synthetic sequence
uggggaagcuggacugcgagg

SEQ ID NO: 3474 - RNA, 21 nt, Artificial Sequence
  Synthetic sequence
uggggagcagagggacaccca

SEQ ID NO: 3475 - RNA, 21 nt, Artificial Sequence
  Synthetic sequence
ugggugucccucugcucccca

SEQ ID NO: 3476 - RNA, 21 nt, Artificial Sequence
  Synthetic sequence
ugucaggguugggaagucccu

SEQ ID NO: 3477 - RNA, 21 nt, Artificial Sequence
  Synthetic sequence
ugucccucugcuccccacccg

SEQ ID NO: 3478 - RNA, 21 nt, Artificial Sequence
  Synthetic sequence
uguggaggcagacaagguggg

SEQ ID NO: 3479 - RNA, 21 nt, Artificial Sequence
  Synthetic sequence
uguugcugcaguccgggcugg

SEQ ID NO: 3480 - RNA, 21 nt, Artificial Sequence
  Synthetic sequence
uucccaacccugacaggcggc

SEQ ID NO: 3481 - RNA, 21 nt, Artificial Sequence
  Synthetic sequence
uuccccaccuugucugccucc

SEQ ID NO: 3482 - RNA, 21 nt, Artificial Sequence
  Synthetic sequence
uugcugcaguccgggcuggga

SEQ ID NO: 3483 - RNA, 21 nt, Artificial Sequence
  Synthetic sequence
uugggaagucccuccuagggu

SEQ ID NO: 3484 - RNA, 22 nt, Artificial Sequence
  Synthetic sequence
aacaggcaccguggcuagaccc

SEQ ID NO: 3485 - RNA, 22 nt, Artificial Sequence
  Synthetic sequence
aacccugacaggcggcgggcag

SEQ ID NO: 3486 - RNA, 22 nt, Artificial Sequence
  Synthetic sequence
aagcuggacugcgaggcccugc

SEQ ID NO: 3487 - RNA, 22 nt, Artificial Sequence
  Synthetic sequence
aagguggggaagcuggacugcg

SEQ ID NO: 3488 - RNA, 22 nt, Artificial Sequence
  Synthetic sequence
aagucccuccuagggucuagcc

SEQ ID NO: 3489 - RNA, 22 nt, Artificial Sequence
  Synthetic sequence
acaagguggggaagcuggacug

SEQ ID NO: 3490 - RNA, 22 nt, Artificial Sequence
  Synthetic sequence
acaggcaccguggcuagacccu

SEQ ID NO: 3491 - RNA, 22 nt, Artificial Sequence
  Synthetic sequence
acaggcggcgggcaggugggca

SEQ ID NO: 3492 - RNA, 22 nt, Artificial Sequence
  Synthetic sequence
acccgcucccagcccggacugc

SEQ ID NO: 3493 - RNA, 22 nt, Artificial Sequence
  Synthetic sequence
acccuaggagggacuucccaac

SEQ ID NO: 3494 - RNA, 22 nt, Artificial Sequence
  Synthetic sequence
acccugacaggcggcgggcagg

SEQ ID NO: 3495 - RNA, 22 nt, Artificial Sequence
  Synthetic sequence
accguggcuagacccuaggagg

SEQ ID NO: 3496 - RNA, 22 nt, Artificial Sequence
  Synthetic sequence
accugcccgccgccugucaggg

SEQ ID NO: 3497 - RNA, 22 nt, Artificial Sequence
  Synthetic sequence
acggugccuguugcugcagucc

SEQ ID NO: 3498 - RNA, 22 nt, Artificial Sequence
  Synthetic sequence
acgugcccugggugucccucug

SEQ ID NO: 3499 - RNA, 22 nt, Artificial Sequence
  Synthetic sequence
acugcagcaacaggcaccgugg

SEQ ID NO: 3500 - RNA, 22 nt, Artificial Sequence
  Synthetic sequence
acugcgaggcccugcccaccug

SEQ ID NO: 3501 - RNA, 22 nt, Artificial Sequence
  Synthetic sequence
acuucccaacccugacaggcgg

SEQ ID NO: 3502 - RNA, 22 nt, Artificial Sequence
  Synthetic sequence
agacaagguggggaagcuggac

SEQ ID NO: 3503 - RNA, 22 nt, Artificial Sequence
  Synthetic sequence
agacccuaggagggacuuccca

SEQ ID NO: 3504 - RNA, 22 nt, Artificial Sequence
  Synthetic sequence
agcaacaggcaccguggcuaga

SEQ ID NO: 3505 - RNA, 22 nt, Artificial Sequence
  Synthetic sequence
agcagagggacacccagggcac

SEQ ID NO: 3506 - RNA, 22 nt, Artificial Sequence
  Synthetic sequence
agccacggugccuguugcugca

SEQ ID NO: 3507 - RNA, 22 nt, Artificial Sequence
  Synthetic sequence
agcccggacugcagcaacaggc

SEQ ID NO: 3508 - RNA, 22 nt, Artificial Sequence
  Synthetic sequence
agcggguggggagcagagggac

SEQ ID NO: 3509 - RNA, 22 nt, Artificial Sequence
  Synthetic sequence
agcuggacugcgaggcccugcc

SEQ ID NO: 3510 - RNA, 22 nt, Artificial Sequence
  Synthetic sequence
agcuuccccaccuugucugccu

SEQ ID NO: 3511 - RNA, 22 nt, Artificial Sequence
  Synthetic sequence
aggagggacuucccaacccuga

SEQ ID NO: 3512 - RNA, 22 nt, Artificial Sequence
  Synthetic sequence
aggcaccguggcuagacccuag

SEQ ID NO: 3513 - RNA, 22 nt, Artificial Sequence
  Synthetic sequence
aggcagacaagguggggaagcu

SEQ ID NO: 3514 - RNA, 22 nt, Artificial Sequence
  Synthetic sequence
aggcccugcccaccugcccgcc

SEQ ID NO: 3515 - RNA, 22 nt, Artificial Sequence
  Synthetic sequence
aggcggcgggcaggugggcagg

SEQ ID NO: 3516 - RNA, 22 nt, Artificial Sequence
  Synthetic sequence
agggacuucccaacccugacag

SEQ ID NO: 3517 - RNA, 22 nt, Artificial Sequence
  Synthetic sequence
agggccucgcaguccagcuucc

SEQ ID NO: 3518 - RNA, 22 nt, Artificial Sequence
  Synthetic sequence
agggucuagccacggugccugu

SEQ ID NO: 3519 - RNA, 22 nt, Artificial Sequence
  Synthetic sequence
aggguugggaagucccuccuag

SEQ ID NO: 3520 - RNA, 22 nt, Artificial Sequence
  Synthetic sequence
aggugggcagggccucgcaguc

SEQ ID NO: 3521 - RNA, 22 nt, Artificial Sequence
  Synthetic sequence
agguggggaagcuggacugcga

SEQ ID NO: 3522 - RNA, 22 nt, Artificial Sequence
  Synthetic sequence
aguccagcuuccccaccuuguc

SEQ ID NO: 3523 - RNA, 22 nt, Artificial Sequence
  Synthetic sequence
agucccuccuagggucuagcca

SEQ ID NO: 3524 - RNA, 22 nt, Artificial Sequence
  Synthetic sequence
aguccgggcugggagcgggugg

SEQ ID NO: 3525 - RNA, 22 nt, Artificial Sequence
  Synthetic sequence
caacaggcaccguggcuagacc

SEQ ID NO: 3526 - RNA, 22 nt, Artificial Sequence
  Synthetic sequence
caacccugacaggcggcgggca

SEQ ID NO: 3527 - RNA, 22 nt, Artificial Sequence
  Synthetic sequence
caagguggggaagcuggacugc

SEQ ID NO: 3528 - RNA, 22 nt, Artificial Sequence
  Synthetic sequence
cacccgcucccagcccggacug

SEQ ID NO: 3529 - RNA, 22 nt, Artificial Sequence
  Synthetic sequence
caccguggcuagacccuaggag

SEQ ID NO: 3530 - RNA, 22 nt, Artificial Sequence
  Synthetic sequence
caccugcccgccgccugucagg

SEQ ID NO: 3531 - RNA, 22 nt, Artificial Sequence
  Synthetic sequence
cacggugccuguugcugcaguc

SEQ ID NO: 3532 - RNA, 22 nt, Artificial Sequence
  Synthetic sequence
cagacaagguggggaagcugga

SEQ ID NO: 3533 - RNA, 22 nt, Artificial Sequence
  Synthetic sequence
cagcaacaggcaccguggcuag

SEQ ID NO: 3534 - RNA, 22 nt, Artificial Sequence
  Synthetic sequence
cagcccggacugcagcaacagg

SEQ ID NO: 3535 - RNA, 22 nt, Artificial Sequence
  Synthetic sequence
cagcuuccccaccuugucugcc

SEQ ID NO: 3536 - RNA, 22 nt, Artificial Sequence
  Synthetic sequence
caggcaccguggcuagacccua

SEQ ID NO: 3537 - RNA, 22 nt, Artificial Sequence
  Synthetic sequence
cagggccucgcaguccagcuuc

SEQ ID NO: 3538 - RNA, 22 nt, Artificial Sequence
  Synthetic sequence
caggguugggaagucccuccua

SEQ ID NO: 3539 - RNA, 22 nt, Artificial Sequence
  Synthetic sequence
caggugggcagggccucgcagu

SEQ ID NO: 3540 - RNA, 22 nt, Artificial Sequence
  Synthetic sequence
caguccagcuuccccaccuugu

SEQ ID NO: 3541 - RNA, 22 nt, Artificial Sequence
  Synthetic sequence
caguccgggcugggagcgggug

SEQ ID NO: 3542 - RNA, 22 nt, Artificial Sequence
  Synthetic sequence
ccaacccugacaggcggcgggc

SEQ ID NO: 3543 - RNA, 22 nt, Artificial Sequence
  Synthetic sequence
ccacccgcucccagcccggacu

SEQ ID NO: 3544 - RNA, 22 nt, Artificial Sequence
  Synthetic sequence
ccaccugcccgccgccugucag

SEQ ID NO: 3545 - RNA, 22 nt, Artificial Sequence
  Synthetic sequence
ccacggugccuguugcugcagu

SEQ ID NO: 3546 - RNA, 22 nt, Artificial Sequence
  Synthetic sequence
ccagcccggacugcagcaacag

SEQ ID NO: 3547 - RNA, 22 nt, Artificial Sequence
  Synthetic sequence
ccagcuuccccaccuugucugc

SEQ ID NO: 3548 - RNA, 22 nt, Artificial Sequence
  Synthetic sequence
cccaacccugacaggcggcggg

SEQ ID NO: 3549 - RNA, 22 nt, Artificial Sequence
  Synthetic sequence
cccacccgcucccagcccggac

SEQ ID NO: 3550 - RNA, 22 nt, Artificial Sequence
  Synthetic sequence
cccaccugcccgccgccuguca

SEQ ID NO: 3551 - RNA, 22 nt, Artificial Sequence
  Synthetic sequence
cccagcccggacugcagcaaca

SEQ ID NO: 3552 - RNA, 22 nt, Artificial Sequence
  Synthetic sequence
ccccacccgcucccagcccgga

SEQ ID NO: 3553 - RNA, 22 nt, Artificial Sequence
  Synthetic sequence
cccgccgccugucaggguuggg

SEQ ID NO: 3554 - RNA, 22 nt, Artificial Sequence
  Synthetic sequence
cccgcucccagcccggacugca

SEQ ID NO: 3555 - RNA, 22 nt, Artificial Sequence
  Synthetic sequence
cccggacugcagcaacaggcac

SEQ ID NO: 3556 - RNA, 22 nt, Artificial Sequence
  Synthetic sequence
cccuaggagggacuucccaacc

SEQ ID NO: 3557 - RNA, 22 nt, Artificial Sequence
  Synthetic sequence
cccuccuagggucuagccacgg

SEQ ID NO: 3558 - RNA, 22 nt, Artificial Sequence
  Synthetic sequence
cccucugcuccccacccgcucc

SEQ ID NO: 3559 - RNA, 22 nt, Artificial Sequence
  Synthetic sequence
cccugacaggcggcgggcaggu

SEQ ID NO: 3560 - RNA, 22 nt, Artificial Sequence
  Synthetic sequence
cccugcccaccugcccgccgcc

SEQ ID NO: 3561 - RNA, 22 nt, Artificial Sequence
  Synthetic sequence
cccugggugucccucugcuccc

SEQ ID NO: 3562 - RNA, 22 nt, Artificial Sequence
  Synthetic sequence
ccgccgccugucaggguuggga

SEQ ID NO: 3563 - RNA, 22 nt, Artificial Sequence
  Synthetic sequence
ccgccugucaggguugggaagu

SEQ ID NO: 3564 - RNA, 22 nt, Artificial Sequence
  Synthetic sequence
ccgcucccagcccggacugcag

SEQ ID NO: 3565 - RNA, 22 nt, Artificial Sequence
  Synthetic sequence
ccggacugcagcaacaggcacc

SEQ ID NO: 3566 - RNA, 22 nt, Artificial Sequence
  Synthetic sequence
ccgggcugggagcgggugggga

SEQ ID NO: 3567 - RNA, 22 nt, Artificial Sequence
  Synthetic sequence
ccguggcuagacccuaggaggg

SEQ ID NO: 3568 - RNA, 22 nt, Artificial Sequence
  Synthetic sequence
ccuaggagggacuucccaaccc

SEQ ID NO: 3569 - RNA, 22 nt, Artificial Sequence
  Synthetic sequence
ccuagggucuagccacggugcc

SEQ ID NO: 3570 - RNA, 22 nt, Artificial Sequence
  Synthetic sequence
ccuccuagggucuagccacggu

SEQ ID NO: 3571 - RNA, 22 nt, Artificial Sequence
  Synthetic sequence
ccucgcaguccagcuuccccac

SEQ ID NO: 3572 - RNA, 22 nt, Artificial Sequence
  Synthetic sequence
ccucugcuccccacccgcuccc

SEQ ID NO: 3573 - RNA, 22 nt, Artificial Sequence
  Synthetic sequence
ccugacaggcggcgggcaggug

SEQ ID NO: 3574 - RNA, 22 nt, Artificial Sequence
  Synthetic sequence
ccugcccaccugcccgccgccu

SEQ ID NO: 3575 - RNA, 22 nt, Artificial Sequence
  Synthetic sequence
ccugcccgccgccugucagggu

SEQ ID NO: 3576 - RNA, 22 nt, Artificial Sequence
  Synthetic sequence
ccugggugucccucugcucccc

SEQ ID NO: 3577 - RNA, 22 nt, Artificial Sequence
  Synthetic sequence
ccugucaggguugggaaguccc

SEQ ID NO: 3578 - RNA, 22 nt, Artificial Sequence
  Synthetic sequence
ccuguugcugcaguccgggcug

SEQ ID NO: 3579 - RNA, 22 nt, Artificial Sequence
  Synthetic sequence
cgcaguccagcuuccccaccuu

SEQ ID NO: 3580 - RNA, 22 nt, Artificial Sequence
  Synthetic sequence
cgccgccugucaggguugggaa

SEQ ID NO: 3581 - RNA, 22 nt, Artificial Sequence
  Synthetic sequence
cgccugucaggguugggaaguc

SEQ ID NO: 3582 - RNA, 22 nt, Artificial Sequence
  Synthetic sequence
cgcucccagcccggacugcagc

SEQ ID NO: 3583 - RNA, 22 nt, Artificial Sequence
  Synthetic sequence
cggacugcagcaacaggcaccg

SEQ ID NO: 3584 - RNA, 22 nt, Artificial Sequence
  Synthetic sequence
cgggcaggugggcagggccucg

SEQ ID NO: 3585 - RNA, 22 nt, Artificial Sequence
  Synthetic sequence
cgggcugggagcggguggggag

SEQ ID NO: 3586 - RNA, 22 nt, Artificial Sequence
  Synthetic sequence
cggguggggagcagagggacac

SEQ ID NO: 3587 - RNA, 22 nt, Artificial Sequence
  Synthetic sequence
cggugccuguugcugcaguccg

SEQ ID NO: 3588 - RNA, 22 nt, Artificial Sequence
  Synthetic sequence
cgugcccugggugucccucugc

SEQ ID NO: 3589 - RNA, 22 nt, Artificial Sequence
  Synthetic sequence
cguggcuagacccuaggaggga

SEQ ID NO: 3590 - RNA, 22 nt, Artificial Sequence
  Synthetic sequence
cuagacccuaggagggacuucc

SEQ ID NO: 3591 - RNA, 22 nt, Artificial Sequence
  Synthetic sequence
cuagccacggugccuguugcug

SEQ ID NO: 3592 - RNA, 22 nt, Artificial Sequence
  Synthetic sequence
cuaggagggacuucccaacccu

SEQ ID NO: 3593 - RNA, 22 nt, Artificial Sequence
  Synthetic sequence
cuagggucuagccacggugccu

SEQ ID NO: 3594 - RNA, 22 nt, Artificial Sequence
  Synthetic sequence
cucccagcccggacugcagcaa

SEQ ID NO: 3595 - RNA, 22 nt, Artificial Sequence
  Synthetic sequence
cuccccacccgcucccagcccg

SEQ ID NO: 3596 - RNA, 22 nt, Artificial Sequence
  Synthetic sequence
cuccuagggucuagccacggug

SEQ ID NO: 3597 - RNA, 22 nt, Artificial Sequence
  Synthetic sequence
cucgcaguccagcuuccccacc

SEQ ID NO: 3598 - RNA, 22 nt, Artificial Sequence
  Synthetic sequence
cucugcuccccacccgcuccca

SEQ ID NO: 3599 - RNA, 22 nt, Artificial Sequence
  Synthetic sequence
cugacaggcggcgggcaggugg

SEQ ID NO: 3600 - RNA, 22 nt, Artificial Sequence
  Synthetic sequence
cugcagcaacaggcaccguggc

SEQ ID NO: 3601 - RNA, 22 nt, Artificial Sequence
  Synthetic sequence
cugcaguccgggcugggagcgg

SEQ ID NO: 3602 - RNA, 22 nt, Artificial Sequence
  Synthetic sequence
cugcccaccugcccgccgccug

SEQ ID NO: 3603 - RNA, 22 nt, Artificial Sequence
  Synthetic sequence
cugcccgccgccugucaggguu

SEQ ID NO: 3604 - RNA, 22 nt, Artificial Sequence
  Synthetic sequence
cugcgaggcccugcccaccugc

SEQ ID NO: 3605 - RNA, 22 nt, Artificial Sequence
  Synthetic sequence
cugcuccccacccgcucccagc

SEQ ID NO: 3606 - RNA, 22 nt, Artificial Sequence
  Synthetic sequence
cuggacugcgaggcccugccca

SEQ ID NO: 3607 - RNA, 22 nt, Artificial Sequence
  Synthetic sequence
cugggagcggguggggagcaga

SEQ ID NO: 3608 - RNA, 22 nt, Artificial Sequence
  Synthetic sequence
cugggugucccucugcucccca

SEQ ID NO: 3609 - RNA, 22 nt, Artificial Sequence
  Synthetic sequence
cugucaggguugggaagucccu

SEQ ID NO: 3610 - RNA, 22 nt, Artificial Sequence
  Synthetic sequence
cuguggaggcagacaagguggg

SEQ ID NO: 3611 - RNA, 22 nt, Artificial Sequence
  Synthetic sequence
cuguugcugcaguccgggcugg

SEQ ID NO: 3612 - RNA, 22 nt, Artificial Sequence
  Synthetic sequence
cuucccaacccugacaggcggc

SEQ ID NO: 3613 - RNA, 22 nt, Artificial Sequence
  Synthetic sequence
cuuccccaccuugucugccucc

SEQ ID NO: 3614 - RNA, 22 nt, Artificial Sequence
  Synthetic sequence
gaagcuggacugcgaggcccug

SEQ ID NO: 3615 - RNA, 22 nt, Artificial Sequence
  Synthetic sequence
gaagucccuccuagggucuagc

SEQ ID NO: 3616 - RNA, 22 nt, Artificial Sequence
  Synthetic sequence
gacaagguggggaagcuggacu

SEQ ID NO: 3617 - RNA, 22 nt, Artificial Sequence
  Synthetic sequence
gacaggcggcgggcaggugggc

SEQ ID NO: 3618 - RNA, 22 nt, Artificial Sequence
  Synthetic sequence
gacccuaggagggacuucccaa

SEQ ID NO: 3619 - RNA, 22 nt, Artificial Sequence
  Synthetic sequence
gacugcagcaacaggcaccgug

SEQ ID NO: 3620 - RNA, 22 nt, Artificial Sequence
  Synthetic sequence
gacugcgaggcccugcccaccu

SEQ ID NO: 3621 - RNA, 22 nt, Artificial Sequence
  Synthetic sequence
gacuucccaacccugacaggcg

SEQ ID NO: 3622 - RNA, 22 nt, Artificial Sequence
  Synthetic sequence
gagcagagggacacccagggca

SEQ ID NO: 3623 - RNA, 22 nt, Artificial Sequence
  Synthetic sequence
gagcggguggggagcagaggga

SEQ ID NO: 3624 - RNA, 22 nt, Artificial Sequence
  Synthetic sequence
gaggcagacaagguggggaagc

SEQ ID NO: 3625 - RNA, 22 nt, Artificial Sequence
  Synthetic sequence
gagggacuucccaacccugaca

SEQ ID NO: 3626 - RNA, 22 nt, Artificial Sequence
  Synthetic sequence
gcaacaggcaccguggcuagac

SEQ ID NO: 3627 - RNA, 22 nt, Artificial Sequence
  Synthetic sequence
gcaccguggcuagacccuagga

SEQ ID NO: 3628 - RNA, 22 nt, Artificial Sequence
  Synthetic sequence
gcagacaagguggggaagcugg

SEQ ID NO: 3629 - RNA, 22 nt, Artificial Sequence
  Synthetic sequence
gcagcaacaggcaccguggcua

SEQ ID NO: 3630 - RNA, 22 nt, Artificial Sequence
  Synthetic sequence
gcagggccucgcaguccagcuu

SEQ ID NO: 3631 - RNA, 22 nt, Artificial Sequence
  Synthetic sequence
gcaggugggcagggccucgcag

SEQ ID NO: 3632 - RNA, 22 nt, Artificial Sequence
  Synthetic sequence
gcaguccagcuuccccaccuug

SEQ ID NO: 3633 - RNA, 22 nt, Artificial Sequence
  Synthetic sequence
gcaguccgggcugggagcgggu

SEQ ID NO: 3634 - RNA, 22 nt, Artificial Sequence
  Synthetic sequence
gccacggugccuguugcugcag

SEQ ID NO: 3635 - RNA, 22 nt, Artificial Sequence
  Synthetic sequence
gcccaccugcccgccgccuguc

SEQ ID NO: 3636 - RNA, 22 nt, Artificial Sequence
  Synthetic sequence
gcccgccgccugucaggguugg

SEQ ID NO: 3637 - RNA, 22 nt, Artificial Sequence
  Synthetic sequence
gcccggacugcagcaacaggca

SEQ ID NO: 3638 - RNA, 22 nt, Artificial Sequence
  Synthetic sequence
gcccugcccaccugcccgccgc

SEQ ID NO: 3639 - RNA, 22 nt, Artificial Sequence
  Synthetic sequence
gcccugggugucccucugcucc

SEQ ID NO: 3640 - RNA, 22 nt, Artificial Sequence
  Synthetic sequence
gccgccugucaggguugggaag

SEQ ID NO: 3641 - RNA, 22 nt, Artificial Sequence
  Synthetic sequence
gccucgcaguccagcuucccca

SEQ ID NO: 3642 - RNA, 22 nt, Artificial Sequence
  Synthetic sequence
gccugucaggguugggaagucc

SEQ ID NO: 3643 - RNA, 22 nt, Artificial Sequence
  Synthetic sequence
gccuguugcugcaguccgggcu

SEQ ID NO: 3644 - RNA, 22 nt, Artificial Sequence
  Synthetic sequence
gcgggcaggugggcagggccuc

SEQ ID NO: 3645 - RNA, 22 nt, Artificial Sequence
  Synthetic sequence
gcggguggggagcagagggaca

SEQ ID NO: 3646 - RNA, 22 nt, Artificial Sequence
  Synthetic sequence
gcuagacccuaggagggacuuc

SEQ ID NO: 3647 - RNA, 22 nt, Artificial Sequence
  Synthetic sequence
gcucccagcccggacugcagca

SEQ ID NO: 3648 - RNA, 22 nt, Artificial Sequence
  Synthetic sequence
gcuccccacccgcucccagccc

SEQ ID NO: 3649 - RNA, 22 nt, Artificial Sequence
  Synthetic sequence
gcugcaguccgggcugggagcg

SEQ ID NO: 3650 - RNA, 22 nt, Artificial Sequence
  Synthetic sequence
gcuggacugcgaggcccugccc

SEQ ID NO: 3651 - RNA, 22 nt, Artificial Sequence
  Synthetic sequence
gcugggagcggguggggagcag

SEQ ID NO: 3652 - RNA, 22 nt, Artificial Sequence
  Synthetic sequence
gcuuccccaccuugucugccuc

SEQ ID NO: 3653 - RNA, 22 nt, Artificial Sequence
  Synthetic sequence
ggaagcuggacugcgaggcccu

SEQ ID NO: 3654 - RNA, 22 nt, Artificial Sequence
  Synthetic sequence
ggaagucccuccuagggucuag

SEQ ID NO: 3655 - RNA, 22 nt, Artificial Sequence
  Synthetic sequence
ggacugcagcaacaggcaccgu

SEQ ID NO: 3656 - RNA, 22 nt, Artificial Sequence
  Synthetic sequence
ggacugcgaggcccugcccacc

SEQ ID NO: 3657 - RNA, 22 nt, Artificial Sequence
  Synthetic sequence
ggacuucccaacccugacaggc

SEQ ID NO: 3658 - RNA, 22 nt, Artificial Sequence
  Synthetic sequence
ggagcagagggacacccagggc

SEQ ID NO: 3659 - RNA, 22 nt, Artificial Sequence
  Synthetic sequence
ggagcggguggggagcagaggg

SEQ ID NO: 3660 - RNA, 22 nt, Artificial Sequence
  Synthetic sequence
ggaggcagacaagguggggaag

SEQ ID NO: 3661 - RNA, 22 nt, Artificial Sequence
  Synthetic sequence
ggagggacuucccaacccugac

SEQ ID NO: 3662 - RNA, 22 nt, Artificial Sequence
  Synthetic sequence
ggcaccguggcuagacccuagg

SEQ ID NO: 3663 - RNA, 22 nt, Artificial Sequence
  Synthetic sequence
ggcagacaagguggggaagcug

SEQ ID NO: 3664 - RNA, 22 nt, Artificial Sequence
  Synthetic sequence
ggcagggccucgcaguccagcu

SEQ ID NO: 3665 - RNA, 22 nt, Artificial Sequence
  Synthetic sequence
ggcaggugggcagggccucgca

SEQ ID NO: 3666 - RNA, 22 nt, Artificial Sequence
  Synthetic sequence
ggccucgcaguccagcuucccc

SEQ ID NO: 3667 - RNA, 22 nt, Artificial Sequence
  Synthetic sequence
ggcgggcaggugggcagggccu

SEQ ID NO: 3668 - RNA, 22 nt, Artificial Sequence
  Synthetic sequence
ggcuagacccuaggagggacuu

SEQ ID NO: 3669 - RNA, 22 nt, Artificial Sequence
  Synthetic sequence
ggcugggagcggguggggagca

SEQ ID NO: 3670 - RNA, 22 nt, Artificial Sequence
  Synthetic sequence
gggaagcuggacugcgaggccc

SEQ ID NO: 3671 - RNA, 22 nt, Artificial Sequence
  Synthetic sequence
gggaagucccuccuagggucua

SEQ ID NO: 3672 - RNA, 22 nt, Artificial Sequence
  Synthetic sequence
gggacuucccaacccugacagg

SEQ ID NO: 3673 - RNA, 22 nt, Artificial Sequence
  Synthetic sequence
gggagcagagggacacccaggg

SEQ ID NO: 3674 - RNA, 22 nt, Artificial Sequence
  Synthetic sequence
gggagcggguggggagcagagg

SEQ ID NO: 3675 - RNA, 22 nt, Artificial Sequence
  Synthetic sequence
gggcagggccucgcaguccagc

SEQ ID NO: 3676 - RNA, 22 nt, Artificial Sequence
  Synthetic sequence
gggcaggugggcagggccucgc

SEQ ID NO: 3677 - RNA, 22 nt, Artificial Sequence
  Synthetic sequence
gggccucgcaguccagcuuccc

SEQ ID NO: 3678 - RNA, 22 nt, Artificial Sequence
  Synthetic sequence
gggcugggagcggguggggagc

SEQ ID NO: 3679 - RNA, 22 nt, Artificial Sequence
  Synthetic sequence
ggggaagcuggacugcgaggcc

SEQ ID NO: 3680 - RNA, 22 nt, Artificial Sequence
  Synthetic sequence
ggggagcagagggacacccagg

SEQ ID NO: 3681 - RNA, 22 nt, Artificial Sequence
  Synthetic sequence
gggucuagccacggugccuguu

SEQ ID NO: 3682 - RNA, 22 nt, Artificial Sequence
  Synthetic sequence
ggguggggagcagagggacacc

SEQ ID NO: 3683 - RNA, 22 nt, Artificial Sequence
  Synthetic sequence
gggugucccucugcuccccacc

SEQ ID NO: 3684 - RNA, 22 nt, Artificial Sequence
  Synthetic sequence
ggguugggaagucccuccuagg

SEQ ID NO: 3685 - RNA, 22 nt, Artificial Sequence
  Synthetic sequence
ggucuagccacggugccuguug

SEQ ID NO: 3686 - RNA, 22 nt, Artificial Sequence
  Synthetic sequence
ggugccuguugcugcaguccgg

SEQ ID NO: 3687 - RNA, 22 nt, Artificial Sequence
  Synthetic sequence
ggugggcagggccucgcagucc

SEQ ID NO: 3688 - RNA, 22 nt, Artificial Sequence
  Synthetic sequence
gguggggaagcuggacugcgag

SEQ ID NO: 3689 - RNA, 22 nt, Artificial Sequence
  Synthetic sequence
gguggggagcagagggacaccc

SEQ ID NO: 3690 - RNA, 22 nt, Artificial Sequence
  Synthetic sequence
ggugucccucugcuccccaccc

SEQ ID NO: 3691 - RNA, 22 nt, Artificial Sequence
  Synthetic sequence
gguugggaagucccuccuaggg

SEQ ID NO: 3692 - RNA, 22 nt, Artificial Sequence
  Synthetic sequence
guacgugcccugggugucccuc

SEQ ID NO: 3693 - RNA, 22 nt, Artificial Sequence
  Synthetic sequence
gucaggguugggaagucccucc

SEQ ID NO: 3694 - RNA, 22 nt, Artificial Sequence
  Synthetic sequence
guccagcuuccccaccuugucu

SEQ ID NO: 3695 - RNA, 22 nt, Artificial Sequence
  Synthetic sequence
gucccuccuagggucuagccac

SEQ ID NO: 3696 - RNA, 22 nt, Artificial Sequence
  Synthetic sequence
gucccucugcuccccacccgcu

SEQ ID NO: 3697 - RNA, 22 nt, Artificial Sequence
  Synthetic sequence
guccgggcugggagcggguggg

SEQ ID NO: 3698 - RNA, 22 nt, Artificial Sequence
  Synthetic sequence
gucuagccacggugccuguugc

SEQ ID NO: 3699 - RNA, 22 nt, Artificial Sequence
  Synthetic sequence
gugcccugggugucccucugcu

SEQ ID NO: 3700 - RNA, 22 nt, Artificial Sequence
  Synthetic sequence
gugccuguugcugcaguccggg

SEQ ID NO: 3701 - RNA, 22 nt, Artificial Sequence
  Synthetic sequence
guggaggcagacaaggugggga

SEQ ID NO: 3702 - RNA, 22 nt, Artificial Sequence
  Synthetic sequence
guggcuagacccuaggagggac

SEQ ID NO: 3703 - RNA, 22 nt, Artificial Sequence
  Synthetic sequence
gugggcagggccucgcagucca

SEQ ID NO: 3704 - RNA, 22 nt, Artificial Sequence
  Synthetic sequence
guggggaagcuggacugcgagg

SEQ ID NO: 3705 - RNA, 22 nt, Artificial Sequence
  Synthetic sequence
guggggagcagagggacaccca

SEQ ID NO: 3706 - RNA, 22 nt, Artificial Sequence
  Synthetic sequence
gugucccucugcuccccacccg

SEQ ID NO: 3707 - RNA, 22 nt, Artificial Sequence
  Synthetic sequence
guugcugcaguccgggcuggga

SEQ ID NO: 3708 - RNA, 22 nt, Artificial Sequence
  Synthetic sequence
guugggaagucccuccuagggu

SEQ ID NO: 3709 - RNA, 22 nt, Artificial Sequence
  Synthetic sequence
uacgugcccugggugucccucu

SEQ ID NO: 3710 - RNA, 22 nt, Artificial Sequence
  Synthetic sequence
uagacccuaggagggacuuccc

SEQ ID NO: 3711 - RNA, 22 nt, Artificial Sequence
  Synthetic sequence
uagccacggugccuguugcugc

SEQ ID NO: 3712 - RNA, 22 nt, Artificial Sequence
  Synthetic sequence
uaggagggacuucccaacccug

SEQ ID NO: 3713 - RNA, 22 nt, Artificial Sequence
  Synthetic sequence
uagggucuagccacggugccug

SEQ ID NO: 3714 - RNA, 22 nt, Artificial Sequence
  Synthetic sequence
ucaggguugggaagucccuccu

SEQ ID NO: 3715 - RNA, 22 nt, Artificial Sequence
  Synthetic sequence
uccagcuuccccaccuugucug

SEQ ID NO: 3716 - RNA, 22 nt, Artificial Sequence
  Synthetic sequence
ucccaacccugacaggcggcgg

SEQ ID NO: 3717 - RNA, 22 nt, Artificial Sequence
  Synthetic sequence
ucccagcccggacugcagcaac

SEQ ID NO: 3718 - RNA, 22 nt, Artificial Sequence
  Synthetic sequence
uccccacccgcucccagcccgg

SEQ ID NO: 3719 - RNA, 22 nt, Artificial Sequence
  Synthetic sequence
ucccuccuagggucuagccacg

SEQ ID NO: 3720 - RNA, 22 nt, Artificial Sequence
  Synthetic sequence
ucccucugcuccccacccgcuc

SEQ ID NO: 3721 - RNA, 22 nt, Artificial Sequence
  Synthetic sequence
uccgggcugggagcgggugggg

SEQ ID NO: 3722 - RNA, 22 nt, Artificial Sequence
  Synthetic sequence
uccuagggucuagccacggugc

SEQ ID NO: 3723 - RNA, 22 nt, Artificial Sequence
  Synthetic sequence
ucgcaguccagcuuccccaccu

SEQ ID NO: 3724 - RNA, 22 nt, Artificial Sequence
  Synthetic sequence
ucuagccacggugccuguugcu

SEQ ID NO: 3725 - RNA, 22 nt, Artificial Sequence
  Synthetic sequence
ucugcuccccacccgcucccag

SEQ ID NO: 3726 - RNA, 22 nt, Artificial Sequence
  Synthetic sequence
ugacaggcggcgggcagguggg

SEQ ID NO: 3727 - RNA, 22 nt, Artificial Sequence
  Synthetic sequence
ugcagcaacaggcaccguggcu

SEQ ID NO: 3728 - RNA, 22 nt, Artificial Sequence
  Synthetic sequence
ugcaguccgggcugggagcggg

SEQ ID NO: 3729 - RNA, 22 nt, Artificial Sequence
  Synthetic sequence
ugcccaccugcccgccgccugu

SEQ ID NO: 3730 - RNA, 22 nt, Artificial Sequence
  Synthetic sequence
ugcccgccgccugucaggguug

SEQ ID NO: 3731 - RNA, 22 nt, Artificial Sequence
  Synthetic sequence
ugcccugggugucccucugcuc

SEQ ID NO: 3732 - RNA, 22 nt, Artificial Sequence
  Synthetic sequence
ugccuguugcugcaguccgggc

SEQ ID NO: 3733 - RNA, 22 nt, Artificial Sequence
  Synthetic sequence
ugcgaggcccugcccaccugcc

SEQ ID NO: 3734 - RNA, 22 nt, Artificial Sequence
  Synthetic sequence
ugcuccccacccgcucccagcc

SEQ ID NO: 3735 - RNA, 22 nt, Artificial Sequence
  Synthetic sequence
ugcugcaguccgggcugggagc

SEQ ID NO: 3736 - RNA, 22 nt, Artificial Sequence
  Synthetic sequence
uggacugcgaggcccugcccac

SEQ ID NO: 3737 - RNA, 22 nt, Artificial Sequence
  Synthetic sequence
uggaggcagacaagguggggaa

SEQ ID NO: 3738 - RNA, 22 nt, Artificial Sequence
  Synthetic sequence
uggcuagacccuaggagggacu

SEQ ID NO: 3739 - RNA, 22 nt, Artificial Sequence
  Synthetic sequence
ugggaagucccuccuagggucu

SEQ ID NO: 3740 - RNA, 22 nt, Artificial Sequence
  Synthetic sequence
ugggagcggguggggagcagag

SEQ ID NO: 3741 - RNA, 22 nt, Artificial Sequence
  Synthetic sequence
ugggcagggccucgcaguccag

SEQ ID NO: 3742 - RNA, 22 nt, Artificial Sequence
  Synthetic sequence
uggggaagcuggacugcgaggc

SEQ ID NO: 3743 - RNA, 22 nt, Artificial Sequence
  Synthetic sequence
uggggagcagagggacacccag

SEQ ID NO: 3744 - RNA, 22 nt, Artificial Sequence
  Synthetic sequence
ugggugucccucugcuccccac

SEQ ID NO: 3745 - RNA, 22 nt, Artificial Sequence
  Synthetic sequence
ugucaggguugggaagucccuc

SEQ ID NO: 3746 - RNA, 22 nt, Artificial Sequence
  Synthetic sequence
ugucccucugcuccccacccgc

SEQ ID NO: 3747 - RNA, 22 nt, Artificial Sequence
  Synthetic sequence
uguggaggcagacaaggugggg

SEQ ID NO: 3748 - RNA, 22 nt, Artificial Sequence
  Synthetic sequence
uguugcugcaguccgggcuggg

SEQ ID NO: 3749 - RNA, 22 nt, Artificial Sequence
  Synthetic sequence
uucccaacccugacaggcggcg

SEQ ID NO: 3750 - RNA, 22 nt, Artificial Sequence
  Synthetic sequence
uugcugcaguccgggcugggag

SEQ ID NO: 3751 - RNA, 22 nt, Artificial Sequence
  Synthetic sequence
uugggaagucccuccuaggguc

SEQ ID NO: 3752 - RNA, 20 nt, Artificial Sequence
  Synthetic sequence
uagggguguuauggucacag

SEQ ID NO: 3753 - RNA, 20 nt, Artificial Sequence
  Synthetic sequence
cacagcggguguagacuccg

SEQ ID NO: 3754 - RNA, 20 nt, Artificial Sequence
  Synthetic sequence
acagcggguguagacuccga

SEQ ID NO: 3755 - RNA, 20 nt, Artificial Sequence
  Synthetic sequence
cagcggguguagacuccgag

SEQ ID NO: 3756 - RNA, 20 nt, Artificial Sequence
  Synthetic sequence
agcggguguagacuccgagg

SEQ ID NO: 3757 - RNA, 20 nt, Artificial Sequence
  Synthetic sequence
ccguugcagcuggaacaucg

SEQ ID NO: 3758 - RNA, 20 nt, Artificial Sequence
  Synthetic sequence
cguugcagcuggaacaucgu

SEQ ID NO: 3759 - RNA, 20 nt, Artificial Sequence
  Synthetic sequence
guugcagcuggaacaucgug

SEQ ID NO: 3760 - RNA, 20 nt, Artificial Sequence
  Synthetic sequence
uugcagcuggaacaucgugg

SEQ ID NO: 3761 - RNA, 20 nt, Artificial Sequence
  Synthetic sequence
cuggaacaucgugggggaga

SEQ ID NO: 3762 - RNA, 20 nt, Artificial Sequence
  Synthetic sequence
uggaacaucgugggggagau

SEQ ID NO: 3763 - RNA, 20 nt, Artificial Sequence
  Synthetic sequence
aucgugggggagaugggaag

SEQ ID NO: 3764 - RNA, 20 nt, Artificial Sequence
  Synthetic sequence
ggagucccagcugcgggaaa

SEQ ID NO: 3765 - RNA, 20 nt, Artificial Sequence
  Synthetic sequence
gcugcgggaaagggauuccc

SEQ ID NO: 3766 - RNA, 20 nt, Artificial Sequence
  Synthetic sequence
gggaaucccuuucccgcagc

SEQ ID NO: 3767 - RNA, 20 nt, Artificial Sequence
  Synthetic sequence
ggaaucccuuucccgcagcu

SEQ ID NO: 3768 - RNA, 20 nt, Artificial Sequence
  Synthetic sequence
caaaugucagauaaucaaug

SEQ ID NO: 3769 - RNA, 20 nt, Artificial Sequence
  Synthetic sequence
aaaugucagauaaucaaugu

SEQ ID NO: 3770 - RNA, 20 nt, Artificial Sequence
  Synthetic sequence
accaaggcucagggcguugg

SEQ ID NO: 3771 - RNA, 20 nt, Artificial Sequence
  Synthetic sequence
ccuguugcugcaguccgggc

SEQ ID NO: 3772 - RNA, 20 nt, Artificial Sequence
  Synthetic sequence
ccagcccggacugcagcaac

SEQ ID NO: 3773 - RNA, 20 nt, Artificial Sequence
  Synthetic sequence
ucccuccuagggucuagcca

SEQ ID NO: 3774 - RNA, 20 nt, Artificial Sequence
  Synthetic sequence
aguccgggcugggagcgggu

SEQ ID NO: 3775 - RNA, 20 nt, Artificial Sequence
  Synthetic sequence
auguuuauugugccagaugc

SEQ ID NO: 3776 - RNA, 20 nt, Artificial Sequence
  Synthetic sequence
gugggcagcugaggugaccc

SEQ ID NO: 3777 - RNA, 20 nt, Artificial Sequence
  Synthetic sequence
cacccacacucuccagcauc

SEQ ID NO: 3778 - RNA, 20 nt, Artificial Sequence
  Synthetic sequence
ugucaagccccagaggccac

SEQ ID NO: 3779 - RNA, 20 nt, Artificial Sequence
  Synthetic sequence
gucaagccccagaggccaca

SEQ ID NO: 3780 - RNA, 20 nt, Artificial Sequence
  Synthetic sequence
gucucugucccuguggccuc

SEQ ID NO: 3781 - RNA, 20 nt, Artificial Sequence
  Synthetic sequence
ucucugucccuguggccucu

SEQ ID NO: 3782 - RNA, 20 nt, Artificial Sequence
  Synthetic sequence
cucugucccuguggccucug

SEQ ID NO: 3783 - RNA, 20 nt, Artificial Sequence
  Synthetic sequence
cagcggguguagacuccgag

SEQ ID NO: 3784 - RNA, 20 nt, Artificial Sequence
  Synthetic sequence
cagcagguguagacuccgag

SEQ ID NO: 3785 - RNA, 20 nt, Artificial Sequence
  Synthetic sequence
gcugcgggaaagggauuccc

SEQ ID NO: 3786 - RNA, 20 nt, Artificial Sequence
  Synthetic sequence
gcugcgggaaugggauuccc

SEQ ID NO: 3787 - RNA, 20 nt, Artificial Sequence
  Synthetic sequence
gucaagccccagaggccaca

SEQ ID NO: 3788 - RNA, 20 nt, Artificial Sequence
  Synthetic sequence
gucaagccccagaggacaca

SEQ ID NO: 3789 - protein, 1370 aa, Ezakiella peruensis strain M6.X2
MTKVKDYYIGLDIGTSSVGWAVTDEAYNVLKFNSKKMWGVRLFDDAKTAEERRGQRGARRRLDRKKERLSLLQDFFAEEVAKVDPNFFLRLDNSDLYMEDKDQKLKSKYTLFNDKDFKDKNFHKKYPTIHHLLMDLIEDDSKKDIRLVYLACHYLLKNRGHFIFEGQKFDTKSSFENSLNELKVHLNDEYGLDLEFDNENLINILTDPKLNKTAKKKELKSVIGDTKFLKAVSAIMIGSSQKLVDLFENPEDFDDSAIKSVDFSTTSFDDKYSDYELALGDKIALVNILKEIYDSSILENLLKEADKSKDGNKYISNAFVKKYNKHGQDLKEFKRLVRQYHKSAYFDIFRSEKVNDNYVSYTKSSISNNKRVKANKFTDQEAFYKFAKKHLETIKYKINKVNGSKADLELIDGMLRDMEFKNFMPKIKSSDNGVIPYQLKLMELNKILENQSKHHEFLNVSDEYGSVCDKIASIMEFRIPYYVGPLNPNSKYAWIKKQKDSEITPWNFKDVVDLDSSREEFIDSLIGRCTYLKDEKVLPKASLLYNEYMVLNELNNLKLNDLPITEEMKKKIFDQLFKTRKKVTLKAVANLLKKEFNINGEILLSGTDGDFKQGLNSYNDFKAIVGDKVDSDDYRDKIEEIIKLIVLYGDDKSYLQKKIKAGYGKYFTDSEIKKMAGLNYKDWGRLSKKLLTGLEGANKITGERGSIIHFMREYNLNLMELMSASFTFTEEIQKLNPVDDRKLSYEMVDELYLSPSVKRMLWQSLRIVDEIKNIMGTDSKKIFIEMARGKEEVKARKESRKNQLLKFYKDGKKAFISEIGEERYSYLLSEIEGEEENKFRWDNLYLYYTQLGRCMYSLEPIDISELSSKNIYDQDHIYPKSKIYDDSIENRVLVKKDLNSKKGNSYPIPDEILNKNCYAYWKILYDKGLIGQKKYTRLTRRTGFTDDELVQFISRQIVETRQATKETANLLKTICKNSEIVYSKAENASRFRQEFDIVKCRAVNDLHHMHDAYINIIVGNVYNTKFTKDPMNFVKKQEKARSYNLENMFKYDVKRGGYTAWIADDEKGTVKNASIKRIRKELEGTNYRFTRMNYIESGALFNATLQRKNKGSRPLKDKGPKSSIEKYGGYTNINKACFAVLDIKSKNKIERKLMPVEREIYAKQKNDKKLSDEIFSKYLKDRFGIEDYRVVYPVVKMRTLLKIDGSYYFITGGSDKTLELRSALQLILPKKNEWAIKQIDKSSENDYLTIERIQDLTEELVYNTFDIIVNKFKTSVFKKSFLNLFQDDKIENIDFKFKSMDFKEKCKTLLMLVKAIRASGVRQDLKSIDLKSDYGRLSSKTNNIGNYQEFKIINQSITGLFENEVDLLKL

SEQ ID NO: 3790 - DNA, 4113 bp, Ezakiella peruensis strain M6.X2
atgacaaaagtaaaagattattatatcggacttgatataggtacatcatcagttggctgggcagtaacagacgaggcttacaatgttctaaaattcaactccaagaagatgtggggagttcgtctttttgatgatgccaaaactgctgaagaaagacgagggcaaagaggggccaggagaagacttgaccgcaaaaaagaacgcttaagtctcttgcaagatttttttgcagaggaagttgctaaagtagatccaaatttctttttgcgtctagataacagcgacctttatatggaggacaaagatcaaaagttaaagtccaagtacactttatttaatgataaagattttaaagacaagaacttccacaaaaaatatccgactatccaccatctccttatggacttgattgaagatgatagcaaaaaagatattagactggtttatttagcttgccattacttacttaaaaatcgtggccactttatttttgaaggacaaaaatttgatacaaagagctcctttgaaaattctctaaatgaattaaaggtccacttaaatgatgaatacggtcttgatcttgagtttgataatgaaaatttgataaatatacttacagatcctaagttaaacaagaccgcaaaaaagaaagaacttaaaagtgttattggagatacaaaatttctaaaggcagtatctgctattatgattggtagctctcaaaagctagtagatctatttgaaaatcctgaagactttgatgattcggcaatcaaatcagtggatttttctacgacgagttttgatgataaatatagcgattacgagttagcccttggggataaaattgcccttgtaaatatattaaaagaaatctatgactcatctatacttgaaaatttattaaaagaagccgataaatcaaaagatggcaataagtacatttctaacgcctttgtaaaaaaatataacaagcatggccaggacctcaaggaatttaagcgcctagttagacagtaccataaatcagcctacttcgacatctttaggagtgaaaaagtaaacgataactatgtttcatataccaagtcaagtatatccaataacaagagagtgaaggcgaataagtttacagaccaagaagctttttataagtttgctaaaaagcacctagaaactataaaatacaaaattaataaagttaatggtagcaaagctgaccttgaactaatagatggaatgctaagggatatggaatttaaaaatttcatgccaaagataaaatcttctgataatggagttataccttatcaattgaaacttatggagctaaataagatccttgaaaaccaatccaaacaccatgaatttttaaacgtatccgatgaatatggaagcgtttgcgacaagattgcttcgattatggaatttaggattccatattatgttgggcctttaaatcctaactcaaaatatgcttggattaagaagcaaaaggacagcgaaatcacgccatggaattttaaagatgtagttgatttggattcttcaagggaagagtttatagatagcttaattggcaggtgcacatatttaaaagatgaaaaagttctaccaaaggcctcgcttctctacaatgagtatatggttttaaatgaactcaacaatttaaaattaaatgatcttcctattactgaagaaatgaagaagaaaatcttcgatcaactctttaagaccaggaaaaaagtaacattaaaggctgtcgctaatcttctcaaaaaagaatttaatataaatggagaaatcctattgtccggcacagatggggattttaaacaagggctaaactcttataacgattttaaggccattgttggggacaaggttgacagcgacgactatagggataaaatcgaagaaattatcaagctaatcgtcctctatggagatgacaaatcttacttgcaaaagaaaataaaggcgggatacggcaagtattttacagattcagaaatcaaaaagatggctggcctaaattataaagactggggcagattaagtaaaaaactactcacaggtttagaaggcgccaataaaattacaggcgaaagaggatctataatccattttatgcgtgagtacaatttaaacttaatggaattaatgagcgccagcttcacttttacagaggaaattcaaaagttaaatccagttgacgatagaaaactctcctatgagatggttgatgagctttatttatcaccttcagttaagagaatgttatggcaaagtctaagaatagttgatgaaattaaaaatataatgggcactgattccaagaaaatctttattgaaatggccaggggcaaagaagaagtcaaggctagaaaagaatctagaaaaaatcagctcttaaaattttacaaggatggcaaaaaagcctttatatcagaaatcggcgaagaaagatatagctatcttttaagtgaaatcgaaggagaagaggaaaacaaattcagatgggacaatctttatctctactacacccagcttggcaggtgtatgtatagtcttgagccaattgatatttcagaactctcatcgaaaaacatctatgaccaagaccacatttatccaaagtcaaaaatctatgatgattcaattgaaaacagagttttggttaagaaagatttaaatagcaagaaaggcaattcatacccaataccggatgagattttaaataaaaattgctatgcttattggaaaattctatatgacaagggactaattggtcaaaagaaatataccagacttacacgtaggacaggatttactgatgatgaacttgtccaatttatatccaggcaaatagttgagaccaggcaggctaccaaagaaacagcaaatctcttaaaaaccatttgcaaaaattcagaaatagtttactctaaggcagaaaatgctagcagattcagacaggaatttgatatagtaaaatgccgtgcagtcaatgacctccaccacatgcatgacgcttatataaatataatcgttggcaatgtctacaatacaaaatttaccaaagaccccatgaactttgtcaaaaaacaagagaaagctagaagttataacttggaaaacatgtttaaatatgacgtaaagcgcgggggctatacagcatggatagcagacgatgaaaaaggcactgttaaaaatgctagcatcaagagaataagaaaagaactagaggggaccaactacagatttactcgcatgaattatatagaaagtggtgcactatttaatgctaccctgcaaagaaaaaacaaaggaagtcgccctctaaaagataaggggcctaagagctcaatagaaaaatatggtggatatactaatataaacaaggcttgctttgcagtgttggatattaaatcaaaaaataaaatagaaagaaaattaatgccagttgaaagagaaatatacgctaagcaaaagaatgataaaaaattgagtgatgaaatatttagcaaatatttgaaagatagattcggaattgaagattatagagtagtatatcctgtagtaaagatgagaactttgttaaaaatagatggatcttattattttataactggtggaagtgacaaaacattggaattaaggagtgcacttcaattaatattaccaaagaaaaatgaatgggcaataaagcaaattgataaatccagtgagaatgattacctaacaattgaaaggatacaagatttaacggaagaacttgtatacaatacgtttgatataatagtgaataaatttaaaacatctgtatttaaaaaatcatttttgaatttattccaagatgataaaatcgaaaatatagattttaaattcaaatcaatggattttaaagaaaagtgtaaaactctattgatgctagtaaaagccatcagagcttctggtgtacgccaagacttaaaatctatagatttaaaatcagactatggtagattgagctccaagactaataatataggaaactatcaagaatttaaaatcataaaccaatcaattacaggcctctttgaaaacgaagtggacttgttaaaattatga

SEQ ID NO: 3791 - DNA, 4107 bp, Artificial Sequence
  OMNI-50 human optimized DNA sequence
accaaggtgaaggactactacataggcttggacatcggcacctctagcgtcgggtgggccgtcaccgatgaagcctataacgtgcttaagtttaatagcaagaaaatgtggggcgtgcggctgttcgacgacgctaagacggcagaggagcgtaggggccagcgaggagcaagacgacgtctggatcggaagaaggagagactcagcctgctgcaggacttcttcgccgaagaggtagcaaaggtcgaccccaacttcttcctcaggctggacaattccgatctgtacatggaagataaggaccagaaactgaaaagcaaatatacactgttcaacgacaaggacttcaaggataagaattttcataagaagtaccccacaatacatcacctgctgatggatctgatcgaggacgacagtaagaaggacatccggctcgtctacctggcctgtcactatttgctcaagaacaggggtcatttcatcttcgagggccagaagttcgacactaaatcaagcttcgagaacagtttgaacgagctcaaagttcatttgaacgacgagtatggactggacctcgaatttgacaacgagaacctgattaacatcttgactgacccaaaactcaataaaacggccaagaagaaggagctgaagtccgtaatcggcgacaccaagttcctcaaagccgtttccgcgataatgatcggctctagccagaaactcgtcgacttgttcgagaaccccgaggatttcgacgactctgcgataaagtccgttgacttctcaactacctctttcgacgacaagtactctgactatgaactcgctctgggtgacaagatcgctctggtcaacatccttaaggaaatttacgatagctccatcctcgagaacctgctcaaagaggcagacaagtctaaggacggtaacaaatatatcagtaatgcattcgtgaagaagtacaataaacacggacaagatctgaaagagttcaaacgtctggtacgacaatatcacaagagtgcgtattttgatattttcagatccgagaaggtgaatgacaattacgtcagctacactaaaagctcaattagcaacaataaacgcgtcaaagcaaacaagttcactgatcaagaggccttctacaaattcgccaagaaacatctggagacaatcaagtataagatcaacaaggtaaacggctccaaggcagatctggagctgattgacgggatgctgcgggacatggagttcaagaactttatgcccaaaattaagtccagtgacaacggggtgattccataccagctcaagctgatggaattgaacaaaatactcgagaatcagtcaaagcatcacgagttcctcaatgtcagcgacgagtacggctccgtgtgtgataaaatcgcatctatcatggagttccgtatcccctactacgtgggacccctgaaccccaatagcaagtacgcctggatcaagaagcagaaagatagtgagattactccctggaacttcaaggacgtcgtggaccttgactccagcagagaggagttcattgactcactgatcggacgctgtacttaccttaaggacgagaaggtccttcccaaagcttctttgctgtataacgaatacatggtgctgaacgagctgaataacctgaagttgaacgaccttcccatcaccgaggagatgaagaagaagatatttgaccagttgttcaaaacaagaaagaaggtcacccttaaagcggtggcaaacctgctgaagaaggagttcaacatcaacggcgagattctgctctctgggaccgacggtgacttcaagcagggcttgaactcatacaatgacttcaaagctatcgtgggcgataaagtcgattccgatgattaccgggacaagattgaggagatcattaaactgatagttctttacggtgacgataagagttaccttcagaagaagattaaagctgggtatggaaaatacttcaccgacagtgagattaagaaaatggcggggctgaactacaaggattggggaaggctctcaaagaagctgctgacgggactcgagggtgcaaacaagatcactggagagcggggctccattattcacttcatgagggaatataaccttaatctgatggagcttatgtcagcttcatttacgttcaccgaagagatacagaaacttaaccccgtggatgaccgcaagctgtcatacgaaatggtggacgaactgtacctttctcccagtgtgaaacggatgctctggcagtccctgcgcatcgtcgacgagataaagaacatcatgggaaccgacagtaagaagattttcatcgagatggctcggggtaaggaagaggtgaaagcccgcaaggagtcaaggaagaaccaactgctgaagttctataaagacggaaagaaggcattcatcagcgagattggcgaggagaggtactcttacttgctttctgagatagagggtgaggaagagaataagtttcgatgggataacctgtacctttattatactcaactgggtcgctgcatgtactctttggaacctatcgacatatctgagctgtcttcaaagaatatttacgatcaggatcatatctaccccaaaagcaagatttacgacgacagtatcgagaatagggtgctggtgaagaaggaccttaactccaagaagggtaacagctatcctatcccagacgaaatcctgaacaagaactgttacgcctactggaagatcctgtacgataaaggtcttatcgggcagaagaagtacactcggctgacccggagaactggcttcacggacgacgagctcgttcagttcatctcaagacagatcgtggaaactagacaagcaacaaaggagactgctaacctgctcaagacaatatgtaagaactccgagatcgtgtattccaaagccgagaacgcaagtcggtttaggcaagagttcgacatcgtgaagtgtagggcggtgaacgatcttcatcatatgcacgatgcctacatcaacatcatagtggggaacgtgtataacaccaagttcacgaaggaccctatgaatttcgtaaagaagcaggaaaaggcgcggagctacaatctcgagaatatgttcaagtacgatgtgaaacgtggcggatacaccgcttggatcgccgatgacgagaagggcaccgtgaagaacgcgagtattaaacgtatccggaaggagctggaaggcacaaattataggttcacaagaatgaactacattgagtctggagcgcttttcaacgccactctccagcggaagaataagggctccagacccctgaaggacaaaggcccgaaatcttccatcgagaagtacggcggctacacaaacatcaataaagcctgtttcgctgttcttgacatcaagtctaagaacaagattgagaggaagctgatgcccgtcgagcgtgagatctatgccaaacagaagaacgacaagaagctgtccgacgagattttctcaaagtacctcaaggaccgatttggcatcgaggactacagggttgtctacccagtggtgaaaatgcgcacactgctcaagatcgacggcagctactacttcatcacaggcggttctgataagaccctggagttgcgatctgctctgcagctgattctccctaagaagaacgagtgggcgatcaaacagatcgacaagtcttccgaaaacgactatctgacgatcgagcgtatccaggacctgaccgaggagctggtgtataacactttcgacatcatcgtcaacaagttcaagaccagtgtcttcaagaagtctttccttaacttgtttcaggacgacaagattgagaacattgacttcaagtttaagtccatggacttcaaggagaaatgcaagacacttctcatgctggtcaaggcgattcgggcatccggcgtgaggcaggatctcaagtccatcgacctcaagtctgattacggacggctcagttcaaagaccaacaacatcggcaattaccaggagttcaagattattaatcagtccatcactggactgttcgagaatgaggtcgatctcctgaagctg

SEQ ID NO: 3792 - DNA, 6439 bp, Artificial Sequence
  Synthetic DNA
taatacgactcactatagggagaccacaacggtttccctctagagagacaataaccctgataatgcttcaataatattgaaaaaggaagagtatgcctaagaagaagagaaaggtgggtaccaccaaggtgaaggactactacataggcttggacatcggcacctctagcgtcgggtgggccgtcaccgatgaagcctataacgtgcttaagtttaatagcaagaaaatgtggggcgtgcggctgttcgacgacgctaagacggcagaggagcgtaggggccagcgaggagcaagacgacgtctggatcggaagaaggagagactcagcctgctgcaggacttcttcgccgaagaggtagcaaaggtcgaccccaacttcttcctcaggctggacaattccgatctgtacatggaagataaggaccagaaactgaaaagcaaatatacactgttcaacgacaaggacttcaaggataagaattttcataagaagtaccccacaatacatcacctgctgatggatctgatcgaggacgacagtaagaaggacatccggctcgtctacctggcctgtcactatttgctcaagaacaggggtcatttcatcttcgagggccagaagttcgacactaaatcaagcttcgagaacagtttgaacgagctcaaagttcatttgaacgacgagtatggactggacctcgaatttgacaacgagaacctgattaacatcttgactgacccaaaactcaataaaacggccaagaagaaggagctgaagtccgtaatcggcgacaccaagttcctcaaagccgtttccgcgataatgatcggctctagccagaaactcgtcgacttgttcgagaaccccgaggatttcgacgactctgcgataaagtccgttgacttctcaactacctctttcgacgacaagtactctgactatgaactcgctctgggtgacaagatcgctctggtcaacatccttaaggaaatttacgatagctccatcctcgagaacctgctcaaagaggcagacaagtctaaggacggtaacaaatatatcagtaatgcattcgtgaagaagtacaataaacacggacaagatctgaaagagttcaaacgtctggtacgacaatatcacaagagtgcgtattttgatattttcagatccgagaaggtgaatgacaattacgtcagctacactaaaagctcaattagcaacaataaacgcgtcaaagcaaacaagttcactgatcaagaggccttctacaaattcgccaagaaacatctggagacaatcaagtataagatcaacaaggtaaacggctccaaggcagatctggagctgattgacgggatgctgcgggacatggagttcaagaactttatgcccaaaattaagtccagtgacaacggggtgattccataccagctcaagctgatggaattgaacaaaatactcgagaatcagtcaaagcatcacgagttcctcaatgtcagcgacgagtacggctccgtgtgtgataaaatcgcatctatcatggagttccgtatcccctactacgtgggacccctgaaccccaatagcaagtacgcctggatcaagaagcagaaagatagtgagattactccctggaacttcaaggacgtcgtggacctcgactccagcagagaggagttcattgactcactgatcggacgctgtacttaccttaaggacgagaaggtccttcccaaagcttctttgctgtataacgaatacatggtgctgaacgagctgaataacctgaagttgaacgaccttcccatcaccgaggagatgaagaagaagatatttgaccagttgttcaaaacaagaaagaaggtcacccttaaagcggtggcaaacctgctgaagaaggagttcaacatcaacggcgagattctgctctctgggaccgacggtgacttcaagcagggcttgaactcatacaatgacttcaaagctatcgtgggcgataaagtcgattccgatgattaccgggacaagattgaggagatcattaaactgatagttctttacggtgacgataagagttaccttcagaagaagattaaagctgggtatggaaaatacttcaccgacagtgagattaagaaaatggcggggctgaactacaaggattggggaaggctctcaaagaagctgctgacgggactcgagggtgcaaacaagatcactggagagcggggctccattattcacttcatgagggaatataaccttaatctgatggagcttatgtcagcttcatttacgttcaccgaagagatacagaaacttaaccccgtggatgaccgcaagctgtcatacgaaatggtggacgaactgtacctttctcccagtgtgaaacggatgctctggcagtccctgcgcatcgtcgacgagataaagaacatcatgggaaccgacagtaagaagattttcatcgagatggctcggggtaaggaagaggtgaaagcccgcaaggagtcaaggaagaaccaactgctgaagttctataaagacggaaagaaggcattcatcagcgagattggcgaggagaggtactcttacttgctttctgagatagagggtgaggaagagaataagtttcgatgggataacctgtacctttattatactcaactgggtcgctgcatgtactctttggaacctatcgacatatctgagctgtcttcaaagaatatttacgatcaggatcatatctaccccaaaagcaagatttacgacgacagtatcgagaatagggtgctggtgaagaaggaccttaactccaagaagggtaacagctatcctatcccagacgaaatcctgaacaagaactgttacgcctactggaagatcctgtacgataaaggtcttatcgggcagaagaagtacactcggctgacccggagaactggcttcacggacgacgagctcgttcagttcatctcaagacagatcgtggaaactagacaagcaacaaaggagactgctaacctgctcaagacaatatgtaagaactccgagatcgtgtattccaaagccgagaacgcaagtcggtttaggcaagagttcgacatcgtgaagtgtagggcggtgaacgatcttcatcatatgcacgatgcctacatcaacatcatagtggggaacgtgtataacaccaagttcacgaaggaccctatgaatttcgtaaagaagcaggaaaaggcgcggagctacaatctcgagaatatgttcaagtacgatgtgaaacgtggcggatacaccgcttggatcgccgatgacgagaagggcaccgtgaagaacgcgagtattaaacgtatccggaaggagctggaaggcacaaattataggttcacaagaatgaactacattgagtctggagcgcttttcaacgccactctccagcggaagaataagggctccagacccctgaaggacaaaggcccgaaatcttccatcgagaagtacggcggctacacaaacatcaataaagcctgtttcgctgttcttgacatcaagtctaagaacaagattgagaggaagctgatgcccgtcgagcgtgagatctatgccaaacagaagaacgacaagaagctgtccgacgagattttctcaaagtacctcaaggaccgatttggcatcgaggactacagggttgtctacccagtggtgaaaatgcgcacactgctcaagatcgacggcagctactacttcatcacaggcggttctgataagaccctggagttgcgatctgctctgcagctgattctccctaagaagaacgagtgggcgatcaaacagatcgacaagtcttccgaaaacgactatctgacgatcgagcgtatccaggacctgaccgaggagctggtgtataacactttcgacatcatcgtcaacaagttcaagaccagtgtcttcaagaagtctttccttaacttgtttcaggacgacaagattgagaacattgacttcaagtttaagtccatggacttcaaggagaaatgcaagacacttctcatgctggtcaaggcgattcgggcatccggcgtgaggcaggatctcaagtccatcgacctcaagtctgattacggacggctcagttcaaagaccaacaacatcggcaattaccaggagttcaagattattaatcagtccatcactggactgttcgagaatgaggtcgatctcctgaagctgggatcctacccatacgatgttccagattacgcggccgctccaaaaaagaaaagaaaagttgcggctagccatcatcaccatcaccatcatcattaaggctgctaacaaagcccgaaaggaagctgagttggctgctgccaccgctgagcaataactagcataaccccttggggcctctaaacgggtcttgaggggttttttgctgaaaggaggaactatatccggatatccacaggacgggtgtggtcgccatgatcgcgtagtcgatagtggctccaagtagcgaagcgagcaggactgggcggcggccaaagcggtcggacagtgctccgagaacgggtgcgcatagaaattgcatcaacgcatatagcgctagcagcacgccatagtgactggcgatgctgtcggaatggacgatatcccgcaagaggcccggcagtaccggcataaccaagcctatgcctacagcatccagggtgacggtgccgaggatgacgatgagcgcattgttagatttcatacacggtgcctgactgcgttagcaatttaactgtgataaactaccgcattaaagcttatcgatgataagctgtcaaacatgagaattcttagaaaaactcatcgagcatcaaatgaaactgcaatttattcatatcaggattatcaataccatatttttgaaaaagccgtttctgtaatgaaggagaaaactcaccgaggcagttccataggatggcaagatcctggtatcggtctgcgattccgactcgtccaacatcaatacaacctattaatttcccctcgtcaaaaataaggttatcaagtgagaaatcaccatgagtgacgactgaatccggtgagaatggcaaaagcttatgcatttctttccagacttgttcaacaggccagccattacgctcgtcatcaaaatcactcgcatcaaccaaaccgttattcattcgtgattgcgcctgagcgagacgaaatacgcgatcgctgttaaaaggacaattacaaacaggaatcgaatgcaaccggcgcaggaacactgccagcgcatcaacaatattttcacctgaatcaggatattcttctaatacctggaatgctgttttcccggggatcgcagtggtgagtaaccatgcatcatcaggagtacggataaaatgcttgatggtcggaagaggcataaattccgtcagccagtttagtctgaccatctcatctgtaacatcattggcaacgctacctttgccatgtttcagaaacaactctggcgcatcgggcttcccatacaatcgatagattgtcgcacctgattgcccgacattatcgcgagcccatttatacccatataaatcagcatccatgttggaatttaatcgcggcctcgagcaagacgtttcccgttgaatatggctcataacaccccttgtattactgtttatgtaagcagacagttttattgttcatgaccaaaatcccttaacgtgagttttcgttccactgagcgtcagaccccgtagaaaagatcaaaggatcttcttgagatcctttttttctgcgcgtaatctgctgcttgcaaacaaaaaaaccaccgctaccagcggtggtttgtttgccggatcaagagctaccaactctttttccgaaggtaactggcttcagcagagcgcagataccaaatactgtccttctagtgtagccgtagttaggccaccacttcaagaactctgtagcaccgcctacatacctcgctctgctaatcctgttaccagtggctgctgccagtggcgataagtcgtgtcttaccgggttggactcaagacgatagttaccggataaggcgcagcggtcgggctgaacggggggttcgtgcacacagcccagcttggagcgaacgacctacaccgaactgagatacctacagcgtgagctatgagaaagcgccacgcttcccgaagggagaaaggcggacaggtatccggtaagcggcagggtcggaacaggagagcgcacgagggagcttccagggggaaacgcctggtatctttatagtcctgtcgggtttcgccacctctgacttgagcgtcgatttttgtgatgctcgtcaggggggcggagcctatggaaaaacgccagcaacgcggcctttttacggttcctggccttttgctggccttttgctcacatgttcgatcccgcgaaat

SEQ ID NO: 3793 - DNA, 9542 bp, Artificial Sequence
  Synthetic DNA
ggtcgctgagtagtgcgcgagcaaaatttaagctacaacaaggcaaggcttgaccgacaattgcatgaagaatctgcttagggttaggcgttttgcgctgcttcgcgatgtacgggccagatatacgcgttgacattgattattgactagttattaatagtaatcaattacggggtcattagttcatagcccatatatggagttccgcgttacataacttacggtaaatggcccgcctggctgaccgcccaacgacccccgcccattgacgtcaataatgacgtatgttcccatagtaacgccaatagggactttccattgacgtcaatgggtggagtatttacggtaaactgcccacttggcagtacatcaagtgtatcatatgccaagtacgccccctattgacgtcaatgacggtaaatggcccgcctggcattatgcccagtacatgaccttatgggactttcctacttggcagtacatctacgtattagtcatcgctattaccatggtgatgcggttttggcagtacatcaatgggcgtggatagcggtttgactcacggggatttccaagtctccaccccattgacgtcaatgggagtttgttttggcaccaaaatcaacgggactttccaaaatgtcgtaacaactccgccccattgacgcaaatgggcggtaggcgtgtacggtgggaggtctatataagcagagctctctggctaactagagaacccactgcttactggcttatcgaaattaatacgactcactatagggagacccaagctggctagcgtttaaacttaagcttgccaccatgcctaagaagaagagaaaggtgggtaccggctatacaattggcctggatctgggcgttgcctctcttggctgggccgtcgtgaatgatgagtacgaggtgctggaaagctgcagcaacatctttcctgccgccgagagcgccaacaacgtggaaagaagaggcttccggcaaggcagacggctgagcagaagaagaaggacccggatcagcgacttcagaaagctgtgggagaagtccggcttcgaggtgcccagcaatgagctgaatgaggtgctgcagtaccggatcaagggcatgaacgacaagctgagcgaggacgagctgtaccacgtgctgctgaacagcctgaagcacagaggcatcagctacctggacgacgccgatgatgagaacgcctctggcgattatgccgcctctatcgcctacaacgagaaccagctgaaaacaaagctgccctgcgagatccagtgggagagatacaagaagtacggcgcctaccggggcaacatcacaatccaagaaggcggcgagcccctgacactgagaaatgtgtttaccaccagcgcctacgagaaagagatccagaaactgctggacgtgcagagcatgagcaacgagaaagtgaccaagaagttcatcgacgagtacctcaagatcttcagccggaagagagagtactacatcggccctggcaacaagaagtccagaaccgactacggcgtgtacaccacacagaagaacgaggacggcacctaccacaccgagcagaacctgttcgataagctgatcggcaagtgcagcgtgtaccctgatgagcgtagagccgctggcgccacatacacagcccaagagttcaacctgctgaacgatctgaacaacctggtcatcgacggccggaagctggacgagcaagagaagtgtcagatcgtggatgccgtgaagcacgccaagaccgtgaacatgaagaacatcattgccaaagtgatcggcaccaaggccaacagcatgaacatgaccggcgccagaatcgacaagaatgagaaagaaatcttccacagcttcgaggcctacaacaagctgcggaaggccctggaagagatcgacttcgacatcgagacactgagcaccgacgagctggatgccattggagaggtgctgaccctgaacaccgaccggaagtctatccagaacggcctgcaagagaaacggatcgtggtgcccgatgaagtgcgggatgtgctgatcgccaccagaaagagaaatggcagcctgttctccaagtggcagagcttcggcatccggatcatgaaggaactgatcccagagctgtacgcccagcctaagaaccagatgcagctgctgaccgacatgggcgtgttcaagaccaaggacgagagattcgtggaatacgacaagatccccagcgacctgatcaccgaagagatctacaaccccgtggtggccaagacagtgcggatcaccgttagagtgctgaacgccctgatcaagaagtatggctaccccgaccgggtcgtgatcgagatgcccagagataagaactccgaggaagagaagaagcggatcgccgacttccagaagaacaacgaaaacgagcttggcggcatcatcaagaaagtgaagtccgagtacggcatcgagatcaccgacgccgactttaagaaccacagcaagctgggcctgaagctgagactgtggaacgagcagaatgagacatgcccctacagcggcaagcacatcaagatcgacgacctgctcaacaaccccaacatgttcgaggtggaccacatcatccctctgagcatcagcttcgacgacagcagagccaacaaggtgctggtgtacgccgccgaaaaccagaacaagggcaacagaacccctatggcctacctgagcaacgtgaacagagagtgggacttccacgagtacatgagcttcgtgctgagcaactacaagggcaccatctacggcaagaagcgggacaatctgctgttctccgaggacatctacaagatcgatgtgctgcagggcttcatctcccggaacatcaacgacaccagatacgcctctaaagtgatcctgaactccctgcagagctttttcggcagcaaagaatgcgacaccaaagtgaaggtcgtgcggggcaccttcacacaccagatgcggatgaacctgaagatcgagaagaaccgggaagagtcctacgtgcaccacgccgtggatgctatgctgattgccttcagccagatgggctacgacgcctaccacaaactgaccgagaagtatatcgactacgagcacggcgagttcgtggaccagaagggatacgagaagctgattgagaacgacgtggcctacagagagacaacctatcagaacaagtggatgaccatcaagaagaatatcgagatcgccgctgagaaaaacaagtactggtatcaagtgaatcggaagtccaaccggggcctgtgcaaccagaccatctatggcaccagaaacctggacggcaaaaccgtgaagatctccaagctggacatccggaccgacgacggcatcaaaaagtttaagggcatcgtggaaaagggcaagctggaacggttcctgatgtaccggaacgaccccaagaccttcgagtggctgctgcagatctataaggactacagcgacagcaagaaccccttcgtgcagtacgagtctgagacaggcgacgtgatcaaaaaggtgtccaagacaaacaacggccccaaagtgtgcgagctgagatacgaggatggcgaagtgggctcctgcatcgacatcagccacaaatacggctacaagaagggcagcaagaaagtcatcctggattctctgaacccctaccggatggacgtgtactacaacaccaaggacaaccggtactacttcgtgggcgtgaagtactccgacatcaagtgccagggcgacagctacgtgatcgacgaggataagtatgccgccgctctggtgcaagaaaagatcgtgccagaaggcaagggcagatccgatctgaccgagctgggctatgagttcaagctgtccttctacaagaacgagatcatcgagtacgagaaggacggggagatctacgtcgagcggttcctgtccagaacaatgcctaaagtgtccaactatatcgagacaaagcccctggaagccgccaagttcgagaagagaaacctcgtgggcctcgccaagacaagccggatcagaaagatcagagtggacatcctggggaaccgctacctgaacagcatggaaaacttcgacttcgtcgtgggccacaagggatcctacccatacgatgttccagattacgcggccgctccaaaaaagaaaagaaaagttgaattcggcggcagcggcgccaccaacttcagcctgctgaagcaggccggcgacgtggaggagaaccccggccccatggtgagcaagggcgaggaggataacatggccatcatcaaggagttcatgcgcttcaaggtgcacatggagggctccgtgaacggccacgagttcgagatcgagggcgagggcgagggccgcccctacgagggcacccagaccgccaagctgaaggtgaccaagggtggccccctgcccttcgcctgggacatcctgtcccctcagttcatgtacggctccaaggcctacgtgaagcaccccgccgacatccccgactacttgaagctgtccttccccgagggcttcaagtgggagcgcgtgatgaacttcgaggacggcggcgtggtgaccgtgacccaggactcctccctgcaggacggcgagttcatctacaaggtgaagctgcgcggcaccaacttcccctccgacggccccgtaatgcagaagaagaccatgggctgggaggcctcctccgagcggatgtaccccgaggacggcgccctgaagggcgagatcaagcagaggctgaagctgaaggacggcggccactacgacgctgaggtcaagaccacctacaaggccaagaagcccgtgcagctgcccggcgcctacaacgtcaacatcaagttggacatcacctcccacaacgaggactacaccatcgtggaacagtacgaacgcgccgagggccgccactccaccggcggcatggacgagctgtacaagtagctcgagtctagagggcccgtttaaacccgctgatcagcctcgactgtgccttctagttgccagccatctgttgtttgcccctcccccgtgccttccttgaccctggaaggtgccactcccactgtcctttcctaataaaatgaggaaattgcatcgcattgtctgagtaggtgtcattctattctggggggtggggtggggcaggacagcaagggggaggattgggaagacaatagcaggcatgctggggatgcggtgggctctatggcttctgaggcggaaagaaccagctggggctctagggggtatccccacgcgccctgtagcggcgcattaagcgcggcgggtgtggtggttacgcgcagcgtgaccgctacacttgccagcgccctagcgcccgctcctttcgctttcttcccttcctttctcgccacgttcgccggctttccccgtcaagctctaaatcgggggctccctttagggttccgatttagtgctttacggcacctcgaccccaaaaaacttgattagggtgatggttcacgtagtgggccatcgccctgatagacggtttttcgccctttgacgttggagtccacgttctttaatagtggactcttgttccaaactggaacaacactcaaccctatctcggtctattcttttgatttataagggattttgccgatttcggcctattggttaaaaaatgagctgatttaacaaaaatttaacgcgaattaattctgtggaatgtgtgtcagttagggtgtggaaagtccccaggctccccagcaggcagaagtatgcaaagcatgcatctcaattagtcagcaaccaggtgtggaaagtccccaggctccccagcaggcagaagtatgcaaagcatgcatctcaattagtcagcaaccatagtcccgcccctaactccgcccatcccgcccctaactccgcccagttccgcccattctccgccccatggctgactaattttttttatttatgcagaggccgaggccgcctctgcctctgagctattccagaagtagtgaggaggcttttttggaggcctaggcttttgcaaaaagctcccgggagcttgtatatccattttcggatctgatcaagagacaggatgaggatcgtttcgcatgattgaacaagatggattgcacgcaggttctccggccgcttgggtggagaggctattcggctatgactgggcacaacagacaatcggctgctctgatgccgccgtgttccggctgtcagcgcaggggcgcccggttctttttgtcaagaccgacctgtccggtgccctgaatgaactgcaggacgaggcagcgcggctatcgtggctggccacgacgggcgttccttgcgcagctgtgctcgacgttgtcactgaagcgggaagggactggctgctattgggcgaagtgccggggcaggatctcctgtcatctcaccttgctcctgccgagaaagtatccatcatggctgatgcaatgcggcggctgcatacgcttgatccggctacctgcccattcgaccaccaagcgaaacatcgcatcgagcgagcacgtactcggatggaagccggtcttgtcgatcaggatgatctggacgaagagcatcaggggctcgcgccagccgaactgttcgccaggctcaaggcgcgcatgcccgacggcgaggatctcgtcgtgacccatggcgatgcctgcttgccgaatatcatggtggaaaatggccgcttttctggattcatcgactgtggccggctgggtgtggcggaccgctatcaggacatagcgttggctacccgtgatattgctgaagagcttggcggcgaatgggctgaccgcttcctcgtgctttacggtatcgccgctcccgattcgcagcgcatcgccttctatcgccttcttgacgagttcttctgagcgggactctggggttcgaaatgaccgaccaagcgacgcccaacctgccatcacgagatttcgattccaccgccgccttctatgaaaggttgggcttcggaatcgttttccgggacgccggctggatgatcctccagcgcggggatctcatgctggagttcttcgcccaccccaacttgtttattgcagcttataatggttacaaataaagcaatagcatcacaaatttcacaaataaagcatttttttcactgcattctagttgtggtttgtccaaactcatcaatgtatcttatcatgtctgtataccgtcgacctctagctagagcttggcgtaatcatggtcatagctgtttcctgtgtgaaattgttatccgctcacaattccacacaacatacgagccggaagcataaagtgtaaagcctggggtgcctaatgagtgagctaactcacattaattgcgttgcgctcactgcccgctttccagtcgggaaacctgtcgtgccagctgcattaatgaatcggccaacgcgcggggagaggcggtttgcgtattgggcgctcttccgcttcctcgctcactgactcgctgcgctcggtcgttcggctgcggcgagcggtatcagctcactcaaaggcggtaatacggttatccacagaatcaggggataacgcaggaaagaacatgtgagcaaaaggccagcaaaaggccaggaaccgtaaaaaggccgcgttgctggcgtttttccataggctccgcccccctgacgagcatcacaaaaatcgacgctcaagtcagaggtggcgaaacccgacaggactataaagataccaggcgtttccccctggaagctccctcgtgcgctctcctgttccgaccctgccgcttaccggatacctgtccgcctttctcccttcgggaagcgtggcgctttctcatagctcacgctgtaggtatctcagttcggtgtaggtcgttcgctccaagctgggctgtgtgcacgaaccccccgttcagcccgaccgctgcgccttatccggtaactatcgtcttgagtccaacccggtaagacacgacttatcgccactggcagcagccactggtaacaggattagcagagcgaggtatgtaggcggtgctacagagttcttgaagtggtggcctaactacggctacactagaagaacagtatttggtatctgcgctctgctgaagccagttaccttcggaaaaagagttggtagctcttgatccggcaaacaaaccaccgctggtagcggtggtttttttgtttgcaagcagcagattacgcgcagaaaaaaaggatctcaagaagatcctttgatcttttctacggggtctgacgctcagtggaacgaaaactcacgttaagggattttggtcatgagattatcaaaaaggatcttcacctagatccttttaaattaaaaatgaagttttaaatcaatctaaagtatatatgagtaaacttggtctgacagttaccaatgcttaatcagtgaggcacctatctcagcgatctgtctatttcgttcatccatagttgcctgactccccgtcgtgtagataactacgatacgggagggcttaccatctggccccagtgctgcaatgataccgcgagacccacgctcaccggctccagatttatcagcaataaaccagccagccggaagggccgagcgcagaagtggtcctgcaactttatccgcctccatccagtctattaattgttgccgggaagctagagtaagtagttcgccagttaatagtttgcgcaacgttgttgccattgctacaggcatcgtggtgtcacgctcgtcgtttggtatggcttcattcagctccggttcccaacgatcaaggcgagttacatgatcccccatgttgtgcaaaaaagcggttagctccttcggtcctccgatcgttgtcagaagtaagttggccgcagtgttatcactcatggttatggcagcactgcataattctcttactgtcatgccatccgtaagatgcttttctgtgactggtgagtactcaaccaagtcattctgagaatagtgtatgcggcgaccgagttgctcttgcccggcgtcaatacgggataataccgcgccacatagcagaactttaaaagtgctcatcattggaaaacgttcttcggggcgaaaactctcaaggatcttaccgctgttgagatccagttcgatgtaacccactcgtgcacccaactgatcttcagcatcttttactttcaccagcgtttctgggtgagcaaaaacaggaaggcaaaatgccgcaaaaaagggaataagggcgacacggaaatgttgaatactcatactcttcctttttcaatattattgaagcatttatcagggttattgtctcatgagcggatacatatttgaatgtatttagaaaaataaacaaataggggttccgcgcacatttccccgaaaagtgccacctgacgtcgacggatcgggagatctcccgatcccctatggtgcactctcagtacaatctgctctgatgccgcatagttaagccagtatctgctccctgcttgtgtgttgga

SEQ ID NO: 3794 - DNA, 2749 bp, Artificial Sequence
  Synthetic DNA
gagggcctatttcccatgattccttcatatttgcatatacgatacaaggctgttagagagataattagaattaatttgactgtaaacacaaagatattagtacaaaatacgtgacgtagaaagtaataatttcttgggtagtttgcagttttaaaattatgttttaaaatggactatcatatgcttaccgtaacttgaaagtatttcgatttcttggctttatatatcttgtggaaaggacgaaacaccgcagtccgggctgggagcgggtgtttgagagttatgtaagaaattacatgacgagttcaaataaaaatttattcaaaccgcctatttataggccgcagatgttctgcattatgcttgctattgcaagcttttttgaattctcaaataaaacgaaaggctcagtcgaaagactgggcctttcgttttatctgttgtttgtcggtgaacgctctcctgagtaggacaaatggtaccccgcttcctcgctcactgactcgctacgctcggtcgttcgactgcggcgagcggaaatggcttacgaacggggcggagatttcctggaagatgccaggaagatacttaacagggaagtgagagggccgcggcaaagccgtttttccataggctccgcccccctgacaagcatcacgaaatctgacgctcaaatcagtggtggcgaaacccgacaggactataaagataccaggcgtttccccctggcggctccctcgtgcgctctcctgttcctgcctttcggtttaccggtgtcattccgctgttatggccgcgtttgtctcattccacgcctgacactcagttccgggtaggcagttcgctccaagctggactgtatgcacgaaccccccgttcagtccgaccgctgcgccttatccggtaactatcgtcttgagtccaacccggaaagacatgcaaaagcaccactggcagcagccactggtaattgatttagaggagttagtcttgaagtcatgcgccggttaaggctaaactgaaaggacaagttttggtgactgcgctcctccaagccagttacctcggttcaaagagttggtagctcagagaaccttcgaaaaaccgccctgcaaggcggttttttcgttttcagagcaagagattacgcgcagaccaaaacgatctcaagaagatcatcttattaatcagataaaatatttctagatttcagtgcaatttatctcttcaaatgtagcacctgaagtcagccccatacgatataagttgttactagtgcttggattctcaccaataaaaaacgcccggcggcaaccgagcgttctgaacaaatccagatggagttctgaggtcattactggatctatcaacaggagtccaagcgagaagggttggtttgcgcattcacagttctccgcaagaattgattggctccaattcttggagtggtgaatccgttagcgaggtgccgccggcttccattcaggtcgaggtggcccggctccatgcaccgcgacgcaacgcggggaggcagacaaggtatagggcggcgcctacaatccatgccaacccgttccatgtgctcgccgaggcggcataaatcgccgtgacgatcagcggtccaatgatcgaagttaggctggtaagagccgcgagcgatccttgaagctgtccctgatggtcgtcatctacctgcctggacagcatggcctgcaacgcgggcatcccgatgccgccggaagcgagaagaatcataatggggaaggccatccagcctcgcgtcgcgaacgccagcaagacgtagcccagcgcgtcggccgccatgccggcgataatggcctgcttctcgccgaaacgtttggtggcgggaccagtgacgaaggcttgagcgagggcgtgcaagattccgaataccgcaagcgacaggccgatcatcgtcgcgctccagcgaaagcggtcctcgccgaaaatgacccagagcgctgccggcacctgtcctacgagttgcatgataaagaagacagtcataagtgcggcgacgatagtcatgccccgcgcccaccggaaggagctgactgggttgaaggctctcaagggcatcggtcgacgctctcccttatgcgactcctgcattaggaagcagcccagtagtaggttgaggccgttgagcaccgccgccgcaaggaatggtgcatgcaaggagatggcgcccaacagtcccccggccacggggcctgccaccatacccacgccgaaacaagcgctcatgagcccgaagtggcgagcccgatcttccccatcggtgatgtcggcgatataggcgccagcaaccgcacctgtggcgccggtgatgccggccacgatgcgtccggcgtagaggatccacaggacgggtgtggtcgccatgatcgcgtagtcgatagtggctccaagtagcgaagcgagcaggactgggcggcggccaaagcggtcggacagtgctccgagaacgggtgcgcatagaaattgcatcaacgcatatagcgctagcagcacgccatagtgactggcgatgctgtcggaatggacgatatcccgcaagaggcccggcagtaccggcataaccaagcctatgcctacagcatccagggtgacggtgccgaggatgacgatgagcgcattgttagatttcatacacggtgcctgactgcgttagcaatttaactgtgataaactaccgcattaaagcttatcgatgataagctgtcaa

SEQ ID NO: 3795 - protein, 9 aa, Artificial Sequence
  HA-tag
YPYDVPDYA

SEQ ID NO: 3796 - DNA, 27 bp, Artificial Sequence
  HA-tag
tacccatacgatgttccagattacgct

SEQ ID NO: 3797 - protein, 7 aa, Artificial Sequence
  NLS
PKKKRKV

SEQ ID NO: 3798 - DNA, 21 bp, Artificial Sequence
  NLS
ccaaaaaagaaaagaaaagtt

SEQ ID NO: 3799 - protein, 19 aa, Artificial Sequence
  P2A
ATNFSLLKQAGDVEENPGP

SEQ ID NO: 3800 - DNA, 57 bp, Artificial Sequence
  P2A
gccaccaacttcagcctgctgaagcaggccggcgacgtggaggagaaccccggcccc

SEQ ID NO: 3801 - protein, 236 aa, Artificial Sequence
  mCherry
MVSKGEEDNMAIIKEFMRFKVHMEGSVNGHEFEIEGEGEGRPYEGTQTAKLKVTKGGPLPFAWDILSPQFMYGSKAYVKHPADIPDYLKLSFPEGFKWERVMNFEDGGVVTVTQDSSLQDGEFIYKVKLRGTNFPSDGPVMQKKTMGWEASSERMYPEDGALKGEIKQRLKLKDGGHYDAEVKTTYKAKKPVQLPGAYNVNIKLDITSHNEDYTIVEQYERAEGRHSTGGMDELYK

SEQ ID NO: 3802 - DNA, 711 bp, Artificial Sequence
  mCherry
atggtgagcaagggcgaggaggataacatggccatcatcaaggagttcatgcgcttcaaggtgcacatggagggctccgtgaacggccacgagttcgagatcgagggcgagggcgagggccgcccctacgagggcacccagaccgccaagctgaaggtgaccaagggtggccccctgcccttcgcctgggacatcctgtcccctcagttcatgtacggctccaaggcctacgtgaagcaccccgccgacatccccgactacttgaagctgtccttccccgagggcttcaagtgggagcgcgtgatgaacttcgaggacggcggcgtggtgaccgtgacccaggactcctccctgcaggacggcgagttcatctacaaggtgaagctgcgcggcaccaacttcccctccgacggccccgtaatgcagaagaagaccatgggctgggaggcctcctccgagcggatgtaccccgaggacggcgccctgaagggcgagatcaagcagaggctgaagctgaaggacggcggccactacgacgctgaggtcaagaccacctacaaggccaagaagcccgtgcagctgcccggcgcctacaacgtcaacatcaagttggacatcacctcccacaacgaggactacaccatcgtggaacagtacgaacgcgccgagggccgccactccaccggcggcatggacgagctgtacaagtag

SEQ ID NO: 3803 - RNA, 20 nt, Artificial Sequence
  Synthetic sequence
ucugugaauguuagacccau

SEQ ID NO: 3804 - RNA, 20 nt, Artificial Sequence
  Synthetic sequence
ccaugggagcagcuggucag

SEQ ID NO: 3805 - RNA, 20 nt, Artificial Sequence
  Synthetic sequence
gcaagagacccacacaccgg

SEQ ID NO: 3806 - RNA, 20 nt, Artificial Sequence
  Synthetic sequence
acaccggaggagcgcccgcu

SEQ ID NO: 3807 - RNA, 20 nt, Artificial Sequence
  Synthetic sequence
cgucugggcggugcuacaac

SEQ ID NO: 3808 - RNA, 20 nt, Artificial Sequence
  Synthetic sequence
cuacaacugggcuggcggcc

SEQ ID NO: 3809 - RNA, 20 nt, Artificial Sequence
  Synthetic sequence
gcugcgggaaagggauuccc

SEQ ID NO: 3810 - RNA, 20 nt, Artificial Sequence
  Synthetic sequence
acagcggguguagacuccga

SEQ ID NO: 3811 - RNA, 20 nt, Artificial Sequence
  Synthetic sequence
cagcggguguagacuccgag

SEQ ID NO: 3812 - RNA, 20 nt, Artificial Sequence
  Synthetic sequence
gucaagccccagaggccaca

SEQ ID NO: 3813 - RNA, 23 nt, Artificial Sequence
  Synthetic sequence
ugcaguccgggcugggagcgggu

SEQ ID NO: 3814 - RNA, 19 nt, Artificial Sequence
  Synthetic sequence
guccgggcugggagcgggu

SEQ ID NO: 3815 - RNA, 112 nt, Artificial Sequence
  Synthetic sequence
guuugagaguuauguaagaaauuacaugacgaguucaaauaaaaauuuauucaaaccgccuauuuauaggccgcagauguucugcauuaugcuugcuauugcaagcuuuuuu

SEQ ID NO: 3816 - RNA, 135 nt, Artificial Sequence
  Synthetic sequence
ugcaguccgggcugggagcggguguuugagaguuauguaagaaauuacaugacgaguucaaauaaaaauuuauucaaaccgccuauuuauaggccgcagauguucugcauuaugcuugcuauugcaagcuuuuuu

SEQ ID NO: 3817 - RNA, 134 nt, Artificial Sequence
  Synthetic sequence
gcaguccgggcugggagcggguguuugagaguuauguaagaaauuacaugacgaguucaaauaaaaauuuauucaaaccgccuauuuauaggccgcagauguucugcauuaugcuugcuauugcaagcuuuuuu

SEQ ID NO: 3818 - RNA, 133 nt, Artificial Sequence
  Synthetic sequence
caguccgggcugggagcggguguuugagaguuauguaagaaauuacaugacgaguucaaauaaaaauuuauucaaaccgccuauuuauaggccgcagauguucugcauuaugcuugcuauugcaagcuuuuuu

SEQ ID NO: 3819 - RNA, 132 nt, Artificial Sequence
  Synthetic sequence
aguccgggcugggagcggguguuugagaguuauguaagaaauuacaugacgaguucaaauaaaaauuuauucaaaccgccuauuuauaggccgcagauguucugcauuaugcuugcuauugcaagcuuuuuu

SEQ ID NO: 3820 - RNA, 131 nt, Artificial Sequence
  Synthetic sequence
guccgggcugggagcggguguuugagaguuauguaagaaauuacaugacgaguucaaauaaaaauuuauucaaaccgccuauuuauaggccgcagauguucugcauuaugcuugcuauugcaagcuuuuuu

SEQ ID NO: 3821 - DNA, 43 bp, Artificial Sequence
  Synthetic sequence
ctgttgctgcagtccgggctgggagcgggtggggagcagaggg

SEQ ID NO: 3822 - DNA, 43 bp, Artificial Sequence
  Synthetic sequence
gttaagagacagtccaggctgggagcaggtggggagaggaggg

SEQ ID NO: 3823 - RNA, 18 nt, Artificial Sequence
  Synthetic sequence
uccgggcugggagcgggu

SEQ ID NO: 3824 - RNA, 17 nt, Artificial Sequence
  Synthetic sequence
ccgggcugggagcgggu

SEQ ID NO: 3825 - RNA, 108 nt, Artificial Sequence
  Synthetic sequence
guuugagaguuaugugaaaacaugacgaguucaaauaaaaauuuauucaaaccgccuauuuauaggccgcagauguucugcauuaugcuugcuauugcaagcuuuuuu

SEQ ID NO: 3826 - RNA, 110 nt, Artificial Sequence
  Synthetic sequence
guuugagaguuauguagaaauacaugacgaguucaaauaaaaauuuauucaaaccgccuauuuauaggccgcagauguucugcauuaugcuugcuauugcaagcuuuuuu

SEQ ID NO: 3827 - RNA, 130 nt, Artificial Sequence
  Synthetic sequence
uccgggcugggagcggguguuugagaguuauguaagaaauuacaugacgaguucaaauaaaaauuuauucaaaccgccuauuuauaggccgcagauguucugcauuaugcuugcuauugcaagcuuuuuu

SEQ ID NO: 3828 - RNA, 129 nt, Artificial Sequence
  Synthetic sequence
ccgggcugggagcggguguuugagaguuauguaagaaauuacaugacgaguucaaauaaaaauuuauucaaaccgccuauuuauaggccgcagauguucugcauuaugcuugcuauugcaagcuuuuuu

SEQ ID NO: 3829 - RNA, 128 nt, Artificial Sequence
  Synthetic sequence
aguccgggcugggagcggguguuugagaguuaugugaaaacaugacgaguucaaauaaaaauuuauucaaaccgccuauuuauaggccgcagauguucugcauuaugcuugcuauugcaagcuuuuuu

SEQ ID NO: 3830 - RNA, 130 nt, Artificial Sequence
  Synthetic sequence
aguccgggcugggagcggguguuugagaguuauguagaaauacaugacgaguucaaauaaaaauuuauucaaaccgccuauuuauaggccgcagauguucugcauuaugcuugcuauugcaagcuuuuuu

SEQ ID NO: 3831 - DNA, 34 bp, Artificial Sequence
  dsODN synthetic sequence
ataccgttattaacatatgacaactcaattaaac

SEQ ID NO: 3832 - DNA, 28 bp, Artificial Sequence
  Synthetic sequence
agtccgggctgggagcgggtggggagca

SEQ ID NO: 3833 - DNA, 28 bp, Artificial Sequence
  Synthetic sequence
gtcaagccccagaggccacagggacaga

SEQ ID NO: 3834 - DNA, 28 bp, Artificial Sequence
  Synthetic sequence
agtcctggctgggagcaggtggggagag

SEQ ID NO: 3835 - DNA, 28 bp, Artificial Sequence
  Synthetic sequence
gccaagcctcagaggccacagggcagca
